United States Patent Application Publication US 2017/0283862 A1 - sequence listing, part 2

SEQ ID NO: 1 - DNA, 5315120 bp, Klebsiella pneumoniae subsp. pneumoniae MGH 78578 (residues 1,771,708-3,543,414 of 5,315,120)
atttggaattttttcataatattgattttgtgagagaagaccgtcttatggctgatgcccagttcttgcgctatctgctgattgttcattcccgttctgatcgcatcgataatataaagttgtgatttggtcaaggttaaccgagggcatttgacacagcgtctgctgtctttttccagcccactgctactcgctgttgtcgactccgtcagacgttttgcaatctgattttttacgcggcgcaagtcgctgttcatgctgataaaagtggcatcgccaagacaaagtggtaactgttcaacctgcaaagcgctgtcggtggcgacgaaaataaaaatagacgtgtgcggaggaagttttttgaaaaacgggtggcatagataatgttcaccagcggccatttctgtgaacagcatatcaatcggacctaatatatctgtgaaatagtccacaacggaatacggttcacggatgtgttcttccttcgcgatctcgctaagcagttcgcaaattccgcgattaagaaatatgttttcagtgttaattaaaatatcaggcatagtcatggcgatcgtgaaagttgtcatgcatttaaagtggagaacattaaatgcgtatgcctttaggatatttctaataatcaacaaatgcaataagtctaattttggactttgagctggcgagtaaaattaatggtatattaatcaatggcttattttttagcgttgcgcgggcatgaccgctaatttggcacaaactgcttaaattgcttatattgcatgcgtaaattctggtctcaaatatattaatcagggttacttattcactgtatgaattgctttttcaaaaataccttttgcaggcgcgggtccttgaggagattgcgcctgagcgaaacctggggtggtcattgataaaaaggggcggggtagacccgccgctgcggagggtgaacagcaacggcgtacaacagaatcagttatcaggattgttggaaatgcttttccacaccattcccaggccgatcaacatcgacgcgaagagggcgaacagggtggttgagataaaaatgctggtcatggcggtgcctcagaaagtgcgtatgcagatcattaggcacggtgtcggatgaaaggttccttacccggccgggtatattttcaccagcggcgtccggttgacggcaacaaggcgaatgccacgtcgaagcgccgctgttggcaaggggatcctgacaggcagccgtgttgctaaacgcgctgttcatggggagaatacacgacggcaaagggggagcgattcggacgttgacatccccttaaacaagttatatatacatgtcgcttctgtttattgaatgttaaacagcatcagttatgggactcagaagcgccacagcccccgccgtcgggcgggggtaacttcgccaccggcatgcttatttttcactgaggctggcgaagaaaaattttttatttcgggtcttgaaaaacgcgccttagatattattttatatagcggacaagcaatgcttgcctttatgttgagcttttgaatgaatattcaggaggttaattatggcactcaaaaccttgtcagcactcccggtatttgctgattctctttttgccgatcgctttaatcgtattgaccgtcttttcagccagttaacgggcgatacgccggtgggcactttaccggcttatgatttacagaaagtcgacgacagcaatttcctgctctgcgtcagcgtgcctggctggaaagataatgagctggaaatagaaaccgtaggggggaatctgcatatttccgggaaacgccaggaaaccgatgcctcgacagacagcggtgaacgctggatttataaaggtatccgccgcgctaatttccagctcagtttctctcttcctgaacacgcccaaattaatcaggcgcagctggatagcggcatcttaaaaatagccatccaccaggagatcccggagagcgaaaaaccgcgtaaaattgcgatcgagaatcaggggcgcgtgatagaacataaagtttgattcaccgttgttccgaggatgttaccttaaaggcccgccctgcgggcctttatcctttcttcctgaaaataaaaatggccccccgacgacaaagaaatcgatatgctattctgttaacagacgcagtgagtctgctatttctttcaatttcggcgaggaggaagaatgactgacgagatcgatagcgacgcaaacaatacgcatgaactaaccgctgaagtggctcgggcgctgatcgcgcgcggttggcgactgaccacggcggagtcctgcaccggagggaatctggcggcagcgctctgtgcccaggcggataccgcggcattttatgataccggcgtagtgaccttcagcgatgaagccaagcgcaacgtgctgcaggttcgcgcggaaaccctggcggtacacagcgccgtcagcgaagcctgcgttcaggagatgtcctctggtattctggcgctcgccggggccgatatcgccatcgccgtcagcggctacgccggaccggagggcggggaagatggtacccccgccggcacggtatggtttgcctggaattttcgcggccagactgaaaccaaacggatgtgctttgccggcgactgtgagaccgtggtggcgaaagcggtacgatatgccctggcggcgctgagcgaaaagcttgcccactggcagtgacgatgcccgggggcgcggccttacaggtccattgcctggcgcgctaccggccagcagatctcgccgatgccgttaaggcagggtcgggaaaagagaaagccctgaaacaggcgaatgcccaccgactgcagccagcaccactcctccagggtttcgacaccttcagccaccaccgtaatgccaagatcctcgcagcagcggacgaccgaggcgacaatcgcctgtttggtgccgctaatatggatatcgcgtaccagttccgcatccactttgattttatcaggctgaaaacgggtcagtaacgacaggccggaataacctgcgccaaagtcgtcgatggccagcttcatgcccgcgacgcgcagggctttgagcaccttgcggaactggtcaaagcaggtgatcacctctgtctcggtgacctcgatcagtacctgatccggtctgaggccggccgccagcaggctgtccatcagccagcctacggcgtcagggtggtgatacagcgatccgggcaacaggttaatcgccagctgatgtttcccgagcggcagctggccggcgagagcgaatgcatacgctttgctttcaagatcaaaacggtagcgatcctccgccgcaatggcggcaaacatttccacgggagagccgccggttgggctgcggatcagagcctcgaaggaagaaactcgctttttagccggctcgacaatagcctgcagagcaaactggcaaggttgaccgggcaggtgctgcggcgcggccgtacctgacgcgggcatcatcatccagcgagagggctgcagcggctcgggcaggcaatagcggccgccgtcggcaatgaaggcgctaagcagccggaacatccggtcgttgaccggttcggtgaccccaaacgtgctaaagcgcagaatttcctccagcgcgccatcggtttcaaacagccggagatccagtatgcgcattccggtgccgtgaaaacgtcggtaggctgagtaatcgcgcatcagctccactacgtcgcgatgacgcgggtcgctttggatttcgctgaacagcgactcaagtgcctcctcagtcccttccaggacctggaaaaactgcaggccgttaaacagcagaatgccggtgatgccaaggggcaaatttttactgctggcgcgatggactaaagcgtcgagatcgacgggcgggcggtcaggatgaacctggctgcggtaaatcagggtggttagcatagttgttacgatcgctcccgcggcgtaagaacatccgcgctcagcatgcaagatgagtatggcctgaccctaaaggagggcgaggctgatatgtacaaacattcaaccaaccgtgatgtccgctacgcggaacgcgagcttcactttgtgattccctccactgtacagggaattacacatttggctatctttttctcatcctcaatgcaaaaagacgctaacaggcctctcattccctcctcagacactggcgctgcgtcttattttacctgttaatattagctaccaggaattatcctaccattctatttcccactctcaaaaatgaggcgctggtcttgcctgaatataatcgagtgaatattatcactctaaattaaattcttttgtcaggtttgatatgagcgacttctttattattttgtgtctgattttatgtcccatcatttctttatggagtggcttttcctatattcaggaaaggcgcaagagacggtatgttttccgttccagaagatgattgtttgacagaataaaatgacgagttgtatcagcgtttggcgagcagttgcacaaggttgttaaactgctgacggctattcaaattaaatttactcataatattctttttatgtgaatgaatcgttttgggactaatatttagcgcagcggcgacttcatgcgggctcaggccaatactgaacgcgtaaatgactttggtttgcgcgtcgctgaccgacctgcaggcgcaattaatgcaacgccgcagacgattgaacggcgggtcttgccgcggtagcagcggacgctcaatggcgttagctatctcatctttcagccgctgaacgcgagcgtgaggcggcataaataccgcatgctgcagacaattcggtaaaccctcatctacggtagcgtgttcattgtccgggaaaataaaaagcgtatattgttccggggcatgctgaaaaagatcctggcacaagtaccactcccccgcgaccatttccgtaaatatcacatcagcttgcgccatcgatcctgcatcccattgttgagaaaactgatagtgtggccgcccggcggccttcatcgcttcatcaaccagttcagcaatagcgactcgcaaatagtgattttttatattgaacaaaaaattagtcatataacttccctgtgggcattaaaaaacatatctggataaattaaagaatataatgatgatgcaggtactatttttagccgtggtaatctaagggatgttttccattaatgcaatatctggtggggaaagtgagataacggtatattgatatgcgaaagttcctaataaacaaaaccttaagcatatatttgtaactatttaaagccgtttgctgtttttttatttttgcgatgcataaaaagcttagtgatagccgcgctctgttgttaaaattagcggaggacaagaatacaggatgtatgccgtacttatgaagcagatgctctatttgaaaatgctggcgtggctggaggataatatctattgtaacccggcgatcgatgacctggcgctgtatatgggctattcacgtcggtttgtgtacgacgtgttttaccagtatggccagttacccatcgggcagtatattcgtctgcggcggttgaccatcgcagcggtcagtctgcgcttaacacggcaaccgatcgccgctattgcctggcagttaagctatgactcgcctcagaccttttcccgggagtttaagaagcgcttttcgctctcgccacgtgaataccgttgcgcggcgcactgggacacggcaaagctgttgaaaaagtttcacccggacggagagagcctacctctggctcgttttttttctcttccggaacaggtctattacggctatccgatgaagtatgaactgcgcctgtcggatttggtgttgcaaagcaccgctaagacgagcatcagacaaaaggttgaccgttttttcaccgctggcggaggctcgctttccgtactttccgactacgccgcggcgagtaaaaatgagcttaacgtcgaggttaacgcttttgtcggctgtcatgaggcgggaaagctgccccccgcgctggccatgaaaagctcgctgaccacccggtcagggctttatgtcggggttgaattctacggcagctggtcacgttatgctcgtttatccagcgatctgtatatggagctgctgccatccctgggggtaagtcgtcgggacggctatgacattgaatgttttataacccgccatgcggaaggcgaagaggcaggggacaggcgctatcgcgtacgctattttatcccggtgacgctgtcggcagcgggtctgcggtctgacagcggtagtgggtcagggcctgcgccggggcgaagttaaggtggccggagccacccaggttaacatcaaagcgcaaaccacagcagccaggtgatgagaaagcccgtcacccccatgatggttgtcaagacggtccaggttttgagtccatccggcaccgagagtccgagatagcgcgtgacgacccagaatccggcgtcgttgacgtgcgacagcccgagcgagccgaagcaggtcgccagcgtcaccagcaccagttgcagcggctccagactgacaaccgcctgcgacagcagaccggaggtggtgaggatcgccacggtggccgaaccctgcgaggctctgagcaccagcgatagcagaaaagcggcgggcatcagcggcagatgtattgtctccagcgcctcggctaaggcattaccgatgccggaagcgaccagtacgccgccaaaggcgccgccggcgccggcgacgaggatcacgtccgccgacgaggggatcgcgctgccggtgacttcgcccagctttttcaggctcatccgccgacggatgcccagcgtccagctggccaggcccagggagatcagcagggcgaccggcggggtaccaatgacggtcatcagctggcgaaccgcgttttccggcagcagaagcgcctgacacagcgtcccggaaacaatcagcatgatgggcaccacgatcagcccaccgataaccagcgcattcggcggcggcagacgggtctgctgcgcgttaaccgagagatccggtacttccgccgtttgttgctgctccagcacgttaatcgacagatgataatggcgccgattgataaaccgggcgacaaaatagcccacgataccgacgaccaccgacaccccaatccccgccagcatcagccaaccgacatcgctatgcagaatgcctgccgcagccgctgcgccaggatgggtgggcagcgccacgtggacggttaacatcacgccggccatcggcaggccaaacttcagcggcgatacgtgggcgactttgctgaagccgtagattaacggaatgatgatgataaagccgacttcaaaaaagaccggggtgccgagaataaaagccacgatggttaaggcggcaatggttcgttttgcacccagtacgccggtcaacgttttcgccagcgattcggcgccgccggacatttcaatcagtacccccagcattgagcccagaataataatgctggcgatgtggccaagcaggccgcccatgcctttttcaatggtggttataattttatctgccggaatgccggtggcgaatgccaccagcagactgacgatcaggagcgccacaaaaggatgtgctttcgctttgatcactaacaggagcaacagcactacgctggctaacgcaataagtaacagcgccgatgtcgacataggtttgcctcgggtattaacaggtgtacagagagttatttttttagaaaacggcgtttattttttccggtagggcgagaaccaccccagcccggaaagcgtgtctgtccgggggatatattcgcagccgatccagccgtcataaccggttttatccagtagcgcatagagccacggatagtttatttcgccctcatccggttcatgacggtcgggcagggaggcaatctgaatatggcgatactggccggcatattcggtaataagatggcttaaattgccgtccaccttctgcgcgtgaaacagatctaactgcaccgccaggttcggcctgtcgacccgtttcaccatcgccagcgtctgatattgactgtggtagagatagcccggtttggtctgcggattcagcgcttcgatgagtatccgcttgtcgtggcgggcaaagcactccgccgcgtagcgcagattatcgataagcacggcctcgcaggctgcgcgatccgctcccggcggcaccacgccggccatgatatgcacctgcgggcaaccgagctggcaggcatactccagcgccagctcaatatcgcgtcgggcctccgcgcttctcccggggatggcggcgagcccccattctccggcgttgacgtcgccgggtggggtattgaacagcaccagctgcagctggttctcctgcaggcgctgtctgatttccccggcggcatactcatagggaaacagaaactcaacggcttcaaatcccgcccgggcagcggcggcaaagcgttccaggaacggcagttcggtaaacagcatggataaatttgcagcgaattttggcatggttttatctcagttcttttacttcgtcagcggtcaggtagcggatctcgcggttgccgagggtaaatatcagccgtgcggtctcttccagttcctcggtattgttggtggcttcgcgcagcgatgagccagtgaccaccggtccgtggttggccagtaaaaaggcgttatagcgcggcgccagcccggccagcgcctgggcaatacggtcatcgcccggccggtagtagggaaccaccgggacgtcgccgacgcgcatcaccacatagggggtaaaggggcggatacagttgtgcgggtcgagcccctgcaggcaggagagcgcggtcagatagtggctgtgcaagtggacgatcgccttgcaggccgggttgtgcaaatagaccgcccggtgaaaagtgacctctttcgatggtttatcgccggagatccattccccttgcagcgtcaccaccgacaaccgctgagcctgcagttcgccgaggcaggcgccggtcggcgtcgccagcaggttgccgtccggcagcagcaacgacagattgccagcggagccggtggcatagccgcggctaaacaacgaggcgccaatctgtaccatttcctctcgcagttgttgctcagtcatgacgaaactcctgctgggcacgggcaaagaactggatatcgccgaagttacctgacttcagcgccagggagagcggctggcgggtgtcacgcacccagggcacgccaggggagatggtcggcccaatatggaacgcctcaacccccagggtctgcgccacaatgctcgacgtttcccctccggccacaataaagcgggtaaatcctttcgtcttcagggcggcggcaagagcggcaaacaactgttccacccgttcgctgctggccttgtcgccatactgcgcctggatccgctgcagcgtttgcggctcggtggtggcatagatcatcggcgccagcggcgcatcgcgctgcgcgtccacccagtcagtcagcgtcctgacgtagctctccagatcggtaaagcaggcgcttaagtcgacggcgcgggcgggggcatgttgacgataggccgccacctggctgttggtcatcaccgagcaggagcccgagagcaccaccgccgggccggccagcggcatgccggcctgagcgctttcaccccgggcgccatggcgctgcgcccagtcgcgggcgaggccgatggcgaggccggaaccgccggagaccagcttcatctcccgcagcgccacgccctgggtgagcagatcctgttcgctgagggcgtcgagcaccacatagcgcaccgccggatcgttgactgccgccagcgcggcggcgaccgcctccggcccccgggcgacaatcggccaggcaatcagcgcggcttttccgcgcccctggcgctcaattaagcggcccaggtgcgcatcctccatcggcgtcaccggatggtggcgcatcccggactcattcagcagttgctcgccgacgaacagatatccctgatagaccgtgcggccgttaaccggcagcgccggggaaatcaccgtccgcgtctcacccagctcggccagcagggcatccagcaccgggccaatgttgccctgcgcggtgctgtcgaaagtggaacagtacttgaaataaaactgctgacagccctgggcctgcagccagcgcagggccgccagcgactggctgacggccatttccgccgggcaggagcgggttttcaggctgatgaccaccgcctcgctggtcagcggaatatcgcgggtcggcacgccattcagttgcaccgtcggcatgccgttgcgcacgaggaagctggcaatatccgtggcgccggtgaagtcatcggcaatgacaccaagctgcatgttgtctctcctcactgtttatggcccggcagggtaatgccgttgaaaatcttgatcaccgcgctgtcatcttcccgaccgaatccggcattactggcggaggtgaacatattcagcgcggtggtagcgagcggcagcgggaaggtcagcgcccgggcagtgtcattcaccagcccgagatctttgacaaaaatatcgacagcggattttggcgagtaatcgccatccaggacatgctgcatgcgattctcaaacatccaggaattacccgccgcgtgggtgaccacgtcatacatcgtctccagtgggatcccggcgcgggcggcaagcgccatcgcttcggcggcaacggcgatgtgcaccccggccagcagctgatggataatttttaccgttgagccaagaccaatgtcgctccctatgcggtagactttgccggccacggcgtccagcaccggcgcgaggcgggcaaaggcggcatcgctcccggaggccatcaccgtcatgtcgccggcggccgctttcacggcgccgcccgataccggcgcgtcgagcatcaatagctggtactccgccagcgcctcggcaatggcctgagcatcggcggaggcgatggtggacgacaccatcacgacggtgcccggcttcagatgggcggcgaggccgctctcgccgaacaggatcccccgcacctgggcggcattgaccaccagcagcacaactgcatccagttccgcggcgaacggcaccgcgctggggcccgcgcctttggcgcccgccgccagcagtgcgcgacagttgtcgggattgatgtcaacgccccaggtgttcaggcccgcctgcaggcaggcgcgggcggcgcccatgcccattgaacccagtccaatcacgcagacattagtgtgtgcagccatgctggtctccttgtgaatattagttaattaatgtgatttaatgatagaataaagcgttatcatgtgaaaatatgtgagagttatcacgaataacccacatgaatataaaaaattcacaggcggaaagaggctgcacaacggcgattcttgccctaaaatagcgtaaaaacagcggcaaagcgcgataacaacaccgggtgtcgccaggcccgtagcctgggtggtgacgcctggtgtgaaaaaatggtaaggggagagcggtgattccaatagaacgacatcagcgtattttagccctggtggagcagcgtggggcggtaagcattaacgagctgacggagatcctaggcgtgtcccatatgaccatccgtcgggacgttagtaaactggaggagcaggggctgctggtcagcgtctcgggcggcgtgcgcgccgtcagccggctggctgcggaacccagtcatctggtgaaaagcacgctgcagagtgaggagaaacaggcgatcggcgcgctggcggcgagtcatatcgctaaaaacagttgcatctatctggatgccgggactaccaccctggcgctggcgcgggcgatcctcgaccggaacgatctccaggtggtcaccaatgattttgagataacccagctgctgatcgatgccagccagtgcggcgtgatccacaccggcggcactctgtgccgggagaaccgctcctgcgtgggcgaatcggcggcgcgtacgttacgccacctggctatcgatacggcctttatctccgccagcggctgggacagtcgcgggattttcacccctgatgagaacaaggttaccgtcaaggagaccgtcagccaggtcagcgcgagaagcatcctgctgtgcgacagttcgaaatacaatcaggtggccacgttcatggcgttacctctgacccggttcaccaccatcattaccgaccggcatctctccgatgccgccgccagtcatatcgcccggcacgcctgcgaggtgctgcgggccggataacgcgcgcggccaccgccgggttagcgttgccagtgctcgatcagcgccgcgccgatcccggcgatttgctgatttcgctcggccatgctcgccggcgtatcccgcagataaatcaccacgatgcgctctgctttgttattcgggccaagcagggcgacaatcccgcgcgcaccccgttcgccagctccggtcttatcggcgataaaccagcccgccggcagcacggagcggatcaacggtccggcgacccgatcgtccaccatccactgcagcagctgccgttgcgaacgggcgctcagacgctggctggtcagcagcttgcgcagggtcgcggccatgctggccggggtagtggtgtcgcgggcgtcgccgggaagcgcctcattcagttccgtttcccagcggtcaaggcgggtgacgttgtcgccgatctggcgcaaaaaggcagtcaatcctgcggggccgccgacggtggccagcagcagattggcggcgctgttatcgctcatggtaatggcggcggcacagagttcgccgaccgtcatgccgtcggcaaggtgtttttcgctgaccggcgagtagtccaccagatcctgctggcgatagtggatctttcgctccagctgttcgtcaccggcatccacccgcgccagcactgcgccgcagagcactactttaaaggtgctcatcatgggaaagcgttcatcggcgcgccaggcggtcagcgtgcggccgctggccagatccatttctatcatgcctacgcggcccgacagctggctttcgctttgtttaatttgctcaagcggctgcgggctggcgtgtaccgccagcggcagggtggctaacagggagataatacacaggcgaatataacgcataaccacaatacatccttgagtgagggccgataaaggcgagtaaagaagcgacaaataagaataacccggcgttttgctgattcacaattcctcttttttccttcatcatttgtcatcttttatttcgaataatcaatatctagccctgcctaagcacgctattttttgactcaaggccgtgatgaactataagaaagtactaagtaccgcactctgtcgggcgtcgctatttgccgatcaccacgcccgccggtccctgcggttcgccaacgctatatgccatcccgggaggaactggtgcacccgataattaaggtcatgctggtgggcggtaaggcggacgggctgttggtcagcgtcgccgatgacgcgaccgaggtctcggtgacgcctgcgcagtacggtgcgctatccgggcaaccgttgagctaccgaattgttagccaaaccattgacgatgaacgctatttttttggcgttttcagcgacgcccatcaggatagcgataagctgacgcgggtcgccctgacccgtggaatgaaaaaaatgttctgttaaacccttcccgaaagggggcgtaagagggtatgccgggcgccgctgtgctactgtggcagccttctatttccagggccggacgcataatgattcagtacattcgtattcaaaattttcgctcagtgaaggatatcgcgctggagctcgggccgctgaacattgtcttcggccctaacggctgcggtaaatccaatatttataacgccatccacctgctgaccgctgccgctgagggcaggctttcggggtttatcagcgaagagggcggtctggagaatatgatgtggtccggggagcgttcgcccctcgatcgtcacccccgccggctgcaaatcgcctgccggaccgacagcttcgattatgagctgcagataggcttccctgaaaaattgccctatccgacgcaattcatgctcgatcctatcgttaaagaagagaatatctggctggccggctactcccgccggccttcctcccgcgtactgcagcgcaagaatcaggcggcgtttctcgtcgatgtcaccggggagaaaagtactttcaccgagagtatttatgaaaatgagtcggtgttcggtcagcttggcgagccgcaccgtttccccgaagtatcgcgagtgcgggagaccttgcgccgttggcggttttatcatgaattcgcgattggccgtcattcgccgctgcgtcagccggccgtgggttaccgttcgccagtcctcgacagcgatggccagaatctcgccgccgcctttcagaccattgtcgagatcggcgcggaggagattttgcatgaaatccttgccgacgcctttcccggctgccagttttattgtgaaaacgagcactcgcgtttcgctctgaaaatgcgtcgcgaagggatccgccgcccgctgctggcggcggagatgtccgacggtacgctgcgctttttgtgcctcgccgtcgcgctgctcagtccacgcccgccggcgtttctggcgatcaatgaaccggagaacagcctgcatcgcgacatgttgcccgcgctggcccggctgattatcgaggcctcgcgctacagccagatctggctgaccagccactcggcggagctggcggagcttatcgccgccggggcgccttgtcagcgctatgcgctggagaatcgcggcggggagacgcggattgtcgagtgaagcccgtcatccctgacgggggcgctggagtcaggcggggctctgcgtctctgcggtcggcagcagacggttgccgccgcgtagggtgacgaacgagagcagggtgaagctcagggttatgcagccgaggatcagataggcctgatggaagccgacggtgtcgtacatccggcccacccaggcggaaagcaccaccccggacagctgttttgacagattaaaaccgatcaggaacagggtggccgagaggcgcgggttaaaggcggaagagatatatttaaaagttcccaccagcaggaaggggatctcaaacatatgcagcatcttgaggatcaccacctcgactgccgatgaggcgaaggacgacccgagaatacgcaccgacatgatcatccccgcggtcagcagggcgtttttggcgccgatgcggttaacgatggccggcgcgcagaacatgatcagcgcgttgagcaactcgccgccggtggtgacgaagccaaacacttcggtaccgcgctgcggactggcgaaaaagcttttgaaaaagttggcgaactgctggtcaaacacgtcgtagacgctggcgacacccaccacatagacgataaagccccagaagcgcggcatacgcagcagttctgccgccgtacgcagcgaaaaggcctggcgattggcgcccagcgcctcgataacctgagcgctgttgctgctttccggccgcgacagccagagcagcagaccgagcaccagcgcaaagccggaggcgatccagaaggtgatattgggatcgatgccgaacagcacgccggttatcgaggcgcatagcgcccagccgacgcagcctgcgacccgcactttgccatattcaaagcggttggcccggctgacgcgttcgatataagcttccaccgccccggagccgctggagaaaacaatccccaggtagatcccgcctaccagcgaaccagcgataatattcatctgcagcagcggagagaaaacgaaaataaagaatggcgcgaacagaattaacaataccgtaatggtccacagcagatgtttgcgcaggccgagcttatccgacatcaggccgaacaccggctgaaaaataatggcgaataacgagatagacgagaaaacgatcccggtttccgttttagttaaatggttaacgtccgccagccacaccggaaaaaacgggaagtaggccgacataatgaaatagtaaaagaaaaagaacagcaggaaatagacaaaattatgccgttctcgtggcgccagttctgagaatttcatcaccatgatcccttgttattctgtttgtggggtgggggctgtcgcccccacggattaaaggcaacgcaatgagacctcgtaatgccagcgcgtttggctcaggagccactgcggcagcacgctgggggtccaggagtcatcgcctcccacccccatatgcaggccgtcgagggtgatccacacgccgtcttcggcctgcatcttgtgccagtggtcggtctccatcagctgacgggtgctccatggctgaacggagaagtggaaatgaccgctgatgtgccagcgcccccagtccagcgcctgggtatcacagcgcaggccgttttccgtcgggaagatgtagggggtggtcatcgccgccagcggctgctcccagcgggcgaagcaggcgctgctccgccggtcggggtagttctcatgcggccccagacccagccagctcaccggcgcctgctgatccgccacctggaagtgcagcccgacccgcggcagcggcggcagggtttccgcccgttcgccgtccactgccaaccgcagggttccgtcagcagtgaagtgcatgcgccagtggctgacaatcactacctcttcgccgcgcaggtagtgccagcggcagtcgacgagggtttcatttgccaggcgctgcgcatcgcactggacgcagtgcgcctcaagatcgtacaggccggcgcttctccagcgctccacccaggcgttggggtcgatacgctctacttcgctgaccccgatgtcgttgtcgagcggcgcgcgaataaactggtcacgcaggggagtcaacagctgctcctgaccgccaaccgaccagcggctcagcagacccgtccggcgatcgatggtccagcattgcgaaccggcgcggatctgccagacctcatcgctgacgataagatccggagcgccggcagacacggtgggcgccggcagcgccagcggggcgggcaggggaaactgttgccaggcgacgcggtgctccgcttctgaccaggcggtcgcctggggctgggtcacctccagcgtcagccacaccgcgcgggcgccttcaggcaggatcaggctatcgagcagcgttatctcgtcgctgccctcagggggcagcgccagggtcaggtcgccgtgatacaggggttcaccggccgcctgcacctgccagcgcagcacttcgttatcggttgggcggaacaggtattcgctgatgatgcgcacccgcagcggcgaggtcgacagcagcgtgaactgaaaatactgctgggcgtgcttcgcctccaccagcgacggatgcggcgtgcgatcgggaaacaccagaccgttcatacagaactggcgatcgttaggcttatcaccaaagtcgccgccataggcccagccgacgctgccgtcggcaaaggttttgcggatcgcctggtcggcccagtcccagataaacccgccctgcagccgcgggtactcgcgaaaggcctgccagtaatcggcgaagttgccgaggctgttgcccatcgcgtgggcgtactcgcaaaggatcagcggcctctgctcaccgggcaggctgatccattttttgatcccccatttggggaccgccgggatcggctggtcgcgttcgacgcgggcgtacatcggacagataatatcggtggcggtggtatccgcgccgccgccctcgtactgcaccggacggctcggatcgttgcgtttcagccagtggtacagcgcttcgtggttgccgccgccgccggactcgttgcccagcgaccagatgataatgcacggatggttgcggttgctctgtaccatccgggtgacgcgggcgctgaaggctggcagccacgccggatcgtcggacagccgattcatcggcaccatcccgtgggtttcaatattggcttcatcgaccacgtacagaccgtagcggttgcagagttcataccagcgcggcgcgttgggatagtgcgagcagcgcacggcgttaaagttgttctgcttcatcaacagaatgtcctgcaccatatccgcctcggtgaccacctgcccgcgcaaatgatgatgctcatggcggttaacgccgcggatcagcagcggtttaccgttgagacgcagcaggccatcggcaatctcgatgcggcgaaaaccgatgtcccacgcttcggcctccagcagttcgtcgccgcgccacagggtgaccacggcgcgataacagttcggggtttccgcgctccagtgcgccggcgtcgccaccgccagggagaaatcgacccgttccgcgtagtggccgcgctcatccaccgtcggggtacctaacggctgccgcccggcggcgatctgctcctcgccgcgccacaggctaaccccgacgctgagcccggcaagcgccgcctcagtcgcttcgatggtcgcctggacctgcagagtgccgtcgcgatagagggcgtcaagggctggcgtcaactgcacgtcgcatagccgttgctgcggcttattcagcagccataccgagcggaaaataccgctcatccgccacatatcctggtcttccagccagctgccggcgctccagcgcatgaccatcacgcacaggcggttgtcgcccggacgcagaaaggggctgagatcgaacgccgccggcaggcgactgtcctgcgaatagccgacccacacgccattgcaccacagatgaaacgccgagttgacgccatcgaaaataatctgcgtttgcccgttctcgcgccatgtgtcctcaaccgtaaagtgcagggagtagcagccggtcgggttatcctccggcacccgcggtggggtggtgtcgatgggatagcggacgttggtgtagatcggcgcgtcatagccctccatctgccagttggaaggcacaggcgtgccgcggcagtccggtagatcctgcgtcaaccactgcgcatcgacggcaaacgggctacgggcgtaagagaactgccactcgccgtccagttgacggcggcgggatgaaggtaggttatcgcgggcggcaagctcatcgcgccagctggcgaaaacgggatgcgctggcaggcggttaaggtgggtaatggtctggttctgccagtcttcacgggcgaggacggcgtgaaagtcaggagtgtggctgcggccggtatcgctaatttgcatattaaaccccggtaagtcagaaattgtcgttcgctaaacaggatgattaacgttatcgggtaatttgttttgtccagcaatctcgggggaatcgaaattaacagacgatcacgaaagcgggggcgaagcgctgttttttgtcgcgcgttaaacataaaatgttagcgcacgacattgttattgctgaggagaaaagatgccgcgtcgtaccgcaaccctggaggatgtcgcccgcgccgcgggcgtgtcccagcagacggtctcccgggtgctgaaccgtcctgaggtggtgtcagcccgcacccgcgagcaggtgatccgcgcgatgcaggcgctgcactatgtgcctaaccgctcggcgcagctgcttgccggcaaagcggcgccctccatcgggctgattaccgcctcgctgacgctgcacgccccctcgcagatcgccgccgcgataaagagccatgccagcctgcatcagctggaagtggcgatagcgatgccggcgcaggccgattttgtcgcgctgcaggcccggctggacgagctgcgcgcccagcatattcgcggggtgatcgtcagtctgccgctggagagcgccactgccgagcggctggtgcaagacaatccggatatggcctgcctgtttctcgatgtctccccggaggccgatgtctgctgcgtgcgcttcgaccaccgcgacggctgcggggcctgcgtgcgccacctgtgggagctggggcatcgcgaatttggtctgctggcgggaccggaaagttcggtttccgcccgtctgcgtctcgccagctggcgcgaggcgttgcacagtctgaatattgcccgctctactacggtgtttggcgactggagcgccgccagcggctggcagaaaactttcgagctcctccatctgcagccgcggatcagcgccatagtggtggcaaacgatcagatggcgctcggcgtgctcagcgcgctggcccagctcaatcgcagcggcagccgggcagtatcggtgaccggctacgatgacaccgccgacagcctttacttccagccgccgctcaccacggtggcgcaggacttcgatctgttgggcaaaagggcggtggagcggctgattgccctgatggcggccccgcagctgcggatccgcgagctgctgccgacccggctcatcgtgcgccagtcggcctggcctgtcgccgccgcggaggaccggcagcagaccctggcgcagctgaaagcgctggtggagaagctttagctgctggtcgttgaggctttattgaagttgagcatgctaacttcggcagcaaacgtagagaggtaaagcttatctgtctgcgaaaaatgcaaaacacaatctatccatgcaagcattgatttaccgccagtcatatggcggtttttttttgccccttccaccctgtaccgactgcttcagtccggctttccatctggcatatcctgccgcggcatgctagatcttgcttccgggagacgacgggagacaaggtcatgatggtgattgagggtaaagaggcgatcgcgcgggtggactggcagcgagtgcgaacgatcatcgccgaggccgggctgaatgagcgtgatgttcagcaactggagcaggcgttccgccagagcaccttctgctggtttggctatgagaacggtcagctgattgccgtggcgcgagccatcagcgactgcacctggagcagctatctggcggatgtggcgatcgtccccgctcgtcagggacagggctacgggcaacagctgatgctggccatccgggagcaactcctgccctttggcaaaatatttatctatgcggtggccgataaaattacgttttatcagcgctttggctttgccatgttgactaccggcatggtctgcgccagcgaggaaggcatgcagaaaatgcaggagcagggctatatccgtcagccctgaaaggtgacgcttagaaacgcctggcttaaacgtgtaaaccaggcgcaggctgtcagagggggcgttcgagcacgaaaagatacgcttcccgcgaccagaacagggcggtacggcggcgctccaccgacatggttttcacttcccatccctcacgggtatagctgctgagaaactggctcattttgtcagggtcggccttggcttcgccaaaaaacagactgcccagcagcccctctttatagatcactacccgacactctttcttcatcatcgaccctcctggcgaccggtttactgtggccgtctattgtccgtggctgcgacgattttgcaatcggagaaggcgtaaactgtttacggtactgcagcgggctgagcgcgaagtgctggcgaaaatggtggcgcagggtgccggcgctggcaaacccgcagcgctcagcgatctgatcgatgcccatcgtgctctccgtcaggtgctggcgggcacgcagcagtcgttcctccagcagccagcgggcgggcgttttaccggtggcctcctcaaagcggcgcaaaaaggtgcgcgtccccatgccggcgcgctgggcgagggaagcgacggtatggctggcggcaagatgctggtgcagatagtcaaacagctgaccgaggcgcaggctctcccggctgcgggctaccgggcgcaggacctgctgcgcctgaccgccgtcgcgatggggagagacgaccaggcggcgggcgacgacgttggcggcttcgctgccgaaatcttcacgcaccagatgcagacaaaggtcgatccccgccgcactgccggcggaagtcatcagcaaagcatcgcccacgtaaaggacgtcctccaccacctggatctgcggaaaacgggactgcagcgccgcggtgtagcgccagtgggttgtcgcctggcggccattgagcagcccggcggcggcgagaacgaacaccccggaacagatagaaataatccgacatccgcgggcgtgggcggaagccagcgcggcgcacagcgcctcggggaccggggcgtcgacgccgcgccagccggggaccacgatcgtatccgcctgggcgagaagttcaggaccgccgtcggtcatcaggcggatgccgccggtagcgcacagcggcccttcatcgacggcggcgacggcgaactggtaccagttgtcgcccatttccgggcgcggcaggccgaagatctccacggctacgccaaactcaaaggtgcacaggccatcgtaggcgagggcaaccacctgatgacgtgacggtgtcacagaaggggttgtcaggatgttagcgttttctgtcatggttgtcggcagatcagggtgatgggcgtcagtaaagtagtgttatcacagacaaggagaagacgccatgagtgtagtaacccaatttccccccgccacctccgctgaggctatccgctggttcagccataagctgcatcttgagaccgactgcgccgatgtgcacagcgcccagcgtgccggcgaggtcgacttcgtcctgctgcacgtggtcggcagcgaggaagccttcgccagacgtcacctgccaggcgcgcagcatctcccgcacagccagatcaccgccgagcgaatggcggcctggccggcggagaccctctttgtggtctactgcgccgggccgcactgcaacggcgctgacgttgccgcgctgaagctggccgagctggggcggccggtgaaaatgatgctcggcggactcaccggctgggaagatgagggctatgcgtttgcttccggtgattgaaaatttttcatgtaccatgaaatattctcgtttgcgacccaccactctgcatgccagtatctggacatatagccatccagaagtctaaaaattcaaataatgaactatcacggtgggcaactaacgcgcccaccgctaaggagacagcatgcaacgtcaacaggccccgttccgcgcagacatcgtcggcagttttttgcgcccggacagcattaaacaggcgcgtcagcagctggctgaggggattatcgacgccgctcagctacgcgagattgagaataacgcgatccgtcatctggttcagcagcaatgcgactgcggcctgcacgtggtcaccgacggtgagtttcgtcgcgcatggtggcatttcgatttcttcgatggcctgcagggcgttgaacgttacgatgccgagcaggggatccagttcaacggcgtgcagaccaaagcgcacggcgttcgcgtcaccggcaagctggcgtttggcgaccacccgatgctggaggatttccgctatctgaaaagcatcagcggcgacgcgcagccgaagatgaccattcccagcccgagcgtgctgcacttccgcggcgggcggaaagatatcgatgccacggtctacccggatcttagcgactacttcgacgatctggccaccacctggcgcgacgccatccgcgcgttttatgacgccggctgccgctatctgcagctggacgataccgtgtgggcctatctgtgctccgatgcccagcgccagcaggtacgtgagcgcggcgaggatccggatgcgctggcgcgtatttatgcccgggtgctgaaccaggcgctggagggtaagccggccgatctgacggtgggcttgcacgtctgccggggtaacttccgttcaacctggatctcggaaggcggttacgagccggttgccgaggtgctgtttggcagcgttaatgtcgatgccttcttcctggagtacgacaacgaccgctccggggatttcgcgccgctgcgctttattcgtcccggccatcagcaggtggtcctcgggctgatcaccaccaaaaacggcgagctggagaatccgcagggggtaaaagcgcgactcgccgaggccgcgcagtacgtgccgctcgagcagatctgcctcagcccgcagtgcggtttcgcctccactgaagaggggaatgccctcagcgaagaccagcaatggcaaaaggtccgtctggtgacctccatcgccgccgacgtctggtaattgctttcttagcgcagcgttgcaccgtgatgaggcaacgctgccatcctcttcgccactatcgcccacctgcgccgcatcctgctgttttcacaacctggcaccttttttgccttatcacctctggttagctgttaattctttattttttgcgctactcaggagtgaatcatgcaacgtagaacgttattaaaagcttttgcactctccgcctctgttatggctatgggtctctcctttcaggcctatgccgccgacaccatcaaagtcgggatcatgcattcgctctccgggacgatggcgatttccgaaacgccgctgaaagacgtcgcgctgatggccatcgacgacatcaacgccaaaggcggggtgctgggcaagaaactggagccggtggtggtcgacccggcctccaactggccgctgtttgccgagaaggcgcgccagctgctggcccaggataaagtggcggtggtgtttggctgctggacgtcggtctcgcgtaaatcggtcctgccggtgtttgaggagctgaacggcctgctgttctatccggtgcagtacgaaggggaagagatgtcccccaacgtcttctataccggcgcggcgcctaaccagcaggctatcccggcggtggaatacctgctgagcgaggacggcggcggcgctaaacgtttctttctgctggggacggactacgtctatccgcgcaccaccaacaagatcctccgcgcctttctgcatgccaaagggatccaggacaaagatatcgaggaggtctacaccccgttcggctacagcgattaccagaccatcgtcgccaatatcaaaaaattcgccgccggtggcaaaacggcagtggtctccaccatcaatggcgattccaacgtaccgttctacaaagagctggctaaccagggtctgaaagcgaccgatgtaccggtggtggccttctcggtgggggaagaggagctgcgcggcatcgataccaaaccgctggtcggcaacctcgcggcatggaactactttgaatccgtcgataatccgaccaacaaagccttcgtcgccgattatcgcgcgtatgccaaagcgcacaagctgccgaatgccgatacggtggtgaccaacgatccgatggaagcgacctgggtgggcctgcatatgtgggcgcaggcggtgaccaaagcgggcaccaccgatgttaacaaagtacgcgaggcgatggccgggcagaccttcaaagcgccgtccggatttaccctgaccatggatgccaccaaccaccatctgcataagccggtgatgatcggtgaaattgaaggcaacggccagttcaacgtggtctggcagaccgatgagcccgtccgcgcgcagccgtggagcccgtggatccccggtaatgataagaaacctgaccatccggtgaaaaccgtcagccagtaagcgccacggccgacggggcgggagcgtcgcgcccgtcggccgctgaccagaggagaacgacatgaacgcattgcgtctcatgagtgtgttggcgctattgctgaccttgctgccatggcgggcgcaggccgcggaggcggacgacttcgttgccgccagtcgcagccagcaggcgcagctgttgacccagtgggcggcagcgccgcaggcggatcgtctgccgctgctgcgggcgttgaccaccgagagcctggtgatggacgacggaaaacatgctttccgcacccgacagggcggattacagccattgggcgctgtcgccgcgccgcagggcgaaacccgaccggtccgtctgaccaacaggctgcgcaatctggctgccggcgcgctggccagccaccttattttaagtgacaacgtcacagagcgagcttccgccgcacgaacgctacagcgggaagcgaccccggccatggccgcgctgctgcaacagcggctgcaggcggaaaccgatgataatgtgcggggtctgctggaggtggcgctggcgcgcctgcagctcactcagcctgaggccagcgcgcggctggccgccgtgacgctgctcggccattccgcggacccggaaacccaggcgctgctgatcccctttaccgatgcccagcatgagccggatgcggcggtgcgcgaggcggccagcgatagcctgcaaaagatcaaacatcgtctgctgctcggcgatctgctgggccaggcctttatggggctgtcgctgggctcggtgctgctgctggccgcgctggggctggcgatcacctatggcctgctgggggtgattaacatggcccacggcgagatgttaatgatcggcgcctacagctgctggctggtacagcaggcgctggcgcagctcgcgccgcaatggctggccttttatccgctggtcgcgctgccggtggcgtttctggtgaccgccgggatcggcatggcgctggagcgcaccattattcgtcatctgtatggtcggccgctggaaacgctgctcgccacctgggggatcagcctgatgctaatccagctggtgaggatgctgtttggcgcgcagaacgtggaggtggcaaacccggcctggctctccggcggcgtgcaggtcctgccgaacctgatcctgccgtggaaccggctggcggtgctggcgttcgtcctgctggtgctgtgctttacctggctcatcctgaaccgcacccgtctggggatgaacgtccgcgccgtgacgcagaaccgggcgatggccgcctgctgcggcgtacctaccgggcgggtggatatgctggcctttggcctcggctccggtattgccgggctgggcggcgtggcgctgtcgcagcttggcaacgtcgggcctgaactgggtcagggatacatcatcgactcgtttctggtggtggtgctgggcggcgtcggccagctggccggcagcgtggcggcggcctttgggctgggcattttcaacaaaattctcgaaccgcaaatgggcgcggtgctgggcaagatcctgatcctggtgatgattattctgtttattcagaaacgaccgcagggtctgttcgcgctgaaagggagggttatcgactaatgagccaaccaatcaccttaacgctggcgcagcgcgcgccgcggcctctgcgctggctggggatcctgctggtgctggggctgctgagtatgccattcctggcgctgctgccggcctcccatccgctggcggtgccgagctggctgctgacgctgagcggcaaaatcctctgctacgccattgtggcggtggcgctggatctggtctggggctatgcgggcatgctgtcgctggggcacgggatcttctttgccctcggcgggtacgccatggggatgtacctgatgcgccaggcggcgggcgacggtctgccggcgtttatgtcttttctctcctggagcgagctgccctggttctggtggggcacgcagcatttcgcctgggcgatggcgctggtggtgctggttcccggtctgctggccctggttttcggctggtttgcctttcgctcgaagatcaaaggggtctatttctcgatcatgacccaggccctgacctatgccggtatgctgctgttctttcgcaacgagaccgggtttggcgggaataacggcttcaccggttttaccacgctgctgggctttcctgtcaccgccaccggcacccgcgccagcctgtttatggccacggttttgctgctgttgctgaccctgtggctgggctcggcgctggcgcagagtaagtttggccggatcctcaccgcggtgcgtgacgccgaaaaccggctgatgttctgcgggtacgacccgcgcggcttcaagctgctggtgtggacgctgtcggcggtgctctgcggtctggcgggggcgttatatgtcccgcaggtcgggatcatcaaccccagcgaaatgtcgccgaccaactccatcgaggccgccatctgggtggcgctcggcgggcgcggcaccctgattggcccggtgcttggcgccggattggtcaacggtgcgaaaagcattttcaccgtggcgatgccagagtactggcagctgtttctcggcctcatcttcatcattgtgaccctgtttttaccccgcggggtgatgggcctgctgcgtcgaggagaccgctaatgcaaccggatgaaggactatttacccgccagctgcccggcgatcgctttcgcgaacaaaccgatccggtgctgcagctggagaacatcaacgtcagctttgacggtttccgggcgctgacggatctgtcgctggcgataggcgtcggcgaactgcgctgtgtgatcggccccaacggggcgggcaagaccaccctgatggacgtgatcaccggcaagacccggccgcaaagcggcaaagcgctctatgaccagtcggtggatctgaccactcttgacccggtggccatcgcccgccagggcatcgggcgcaagtttcagaagccgacggtcttcgaagcgctgacggtggcggaaaatctcgccctggcgatgaagggggataaatcggtgtgggccagcctgcgcgcccggataagcagcgaacaggacgatcggctgaatgaggtgctgcgcctgttgcgtcttgacggcgagcgctaccgccaggccggtctgttgtcccatggtcagaaacagtttcttgagatcggcatgctgctggtgcaggagccgcatctgctgctgcttgatgagccggcggccggcatgaccgatgcggaaacggagtatacggcggagctgtttcgtaccctggctggacagcactccctgatggtggtggagcacgacatgggatttgtcgagaccatcgccgaccgggtgacggtcctgcatcagggccaggtgctggcggagggatcgctgcgggaggtacaggccaatgagcaggtcattgaagtttatctgggacgttaaggagcgccaatgttacaggtgagtcagctacatcaatactacggcggcagccatattttacgcggggtggatttttccgcccgccagggcgaagtcacctgcctgctggggcgcaatggcgtcggtaagaccacgctgctgaaatgcctgatggggctgatcccggcgcgcagcggtgaggtacgctggcaggatcagaacatcacccatcgcaaaccgcaccagcgggtgcaggccggggtcgcctacgtcccccaggggcgcgagatatttccgcgctgacggtggaagaaaacctgctgatggggctgtcgcgctttcccgcccgcgaagcgcagcaggtgccggaggagatctaccagcttttcccggtgctcaggaccatgaagcagcggcgaggcggtgacttatccggcggccagcagcagcagctggcgattggccgcgcgctggccagccgcccacagctgctgatccttgatgaacccaccgaggggatccagccctcggtcatcaaagagattggcgaggtgatccgccagctggcgagccgcggagacatggcgatcctgctggtggagcagttctatgactttgccgccggactggcggaccactacctggtgatgtcgcgcggcgccatcgtccagcaaggcaagggtggtgatatggagagcgacggcgtgcgcgccatggtgaccatctgaccatgccggcggcggtcgcgccgccggtttgcggcctatttgcgcagcagccgctgcaggcgcgcctggcgccagtttttaatccattcgccgaacacgaacaggcgtaatcctctcaccaccagcagggcgccccagatcagggcgacccagccggaccagtagtactgtggattagtgaagcggttaagcaccgccagcagcacgcaaaccaccagcgccaccgacagcgaacggaaaaagcggctctcctgatgcacccgcgctttggcttcctctatgcgcagatccagtgaggcttcctggcccggcgcgtcttcccgccgggcttcgccgccgatctcggccaccgtcacctcaaagaccgcggcgagggcgctgagggtctccagccccgggcgttcgccattctcaatgcgctggatcgtgcggacgctgagacccgccatttcggccaactgctcctgggaccaggcgcgctgcagccgtaattgtttgacctgattgttgctgttcatattcgtatgctccataacgttctgcggatgtaaacctgtgatggagtatggtgaaccgggccgccagccaccacgacagcgacccgacaacggcccgacagcaacctgacagccgcatgccagctggcgtcaggcgttggccagcggagaatccggttgccaggggcgggcattgatcccgcggaaaatcatcagccaggcggcgacaatcgccacgataagaatgacaaaaagcgaccagtgcggcagatgggtgaggatcaaccccgtcagcatcgggttgaatgccgcccccagccaccccagcgactgggcggagaagtagctggccttcatccccggcggggcaatatggtcaatcagcatatactccccgggggcataaatcacttccccgagggtgaagatcgccgccgagatcccccacgcccacaggctggcgccagagaacataaagcccacaaggccgatcacaaagcagacggtgccgaaggtcatcagcgggcggatatttctcgcgctcagccgccggccaaccgcgtactgcagagcaaccaccaccgcggcgttgaccggcagcaccacggccaccactttctcggcgaaatcgctgctggcgaccaccagcacatactgcgagagacaggaggcgaaggcgccgccgacgaaggaggccagcagcccggagcaggtaaaccacagcagcgcccggtcgcgcagcaacaccgaaggcgaccagggcgcggcgcccggctgggccgcggcggcgtcatcccgctgaagaaacagctgaataaacaccagcggaaaggcggcgcaggcggccgccagccagaacggcaaattgatactgtgcattaccagcagggtgccgatgggcggcccaacggtccagccgatgttgaggatggtgtagttcagcgagaagatgcgcgcttttttctctgccgtcagccgatcggcgaaccaggctttcaggacggtggaaaagaccgagtaggcgcagttgatcagcgcaaagaagatcaccaccaggagggcgttattgaccagcggtattgcgctgaagccgagaataaacaccagcactgaccacaccatatagcgctttttatcgaacctgtcagcgaggatgccaaaacccatgctgaacaacaccccaaccaccagcgccagcgacagggcatagccaatcacatccacctccagctgaaagcgtcgggtgagatagatggtcataaacggcagtgtggccccgcggccgatagtcaacagtaacgacgatgccagcagcgcgatggtggagcgccggagagtggtgatcatgatttccttgcctgtcatgttgttataattttatgtcttcgatcacaaataacacggtcattacgccttgtacaggtcatcgcggtcgacgggcgcacttccgggcctgccaaaaataatgatctatcccggcggccgctttttcgctactttgattttgttcacaaaaattccaataacgacagaggcaggggtatgacgaggaaagatggactactggcgctgctggtagtggtggtgtgggggcttaactttgtggtgattaagctggggttgcacaatatgccgccgctgatgctggcggggctgcgctttatgctggtcgccttcccggcgctgctgtttgtcgcccggccagctattccgctgcgcctgctgctgggctatggcctgaccataagtttcggtcagttcgcctttctgttctgcgctatcggcctgggtatgccggccgggctggcctcccttgtgctgcaggctcaagccttcttcaccatcatccttggcgccttcgtctttggcgaacgtctgcagggcaagcagctggcggggatcgccctggcgatctttggcgtgctggtgctggtggagggcagccttggcggggagcatgtgccgctggtgggctttatgctgaccctcgcggcggcgctcagctgggcctgcggcaatattttcaacaagaaaatcatgtcccaggcgagccggccgccaatcatgtcgctggtggtctggagcgcgctgatcccggtgctgccgtttatgctggcctcattgttgatcgatggcccgcagaccatgctggcgagtctgcaacacatcgatctgctaacgatactgtcgctgctttatctggcgtttatcgccactatcgtcggctatggcatctggggatcgctgctggggcggtatgaaacctggcgggtggcgccgctgtcgctgctggtgccggtggtgggaatggccagcgctgcgctgctgctcggggagacgctgagcggactgcagctcaccggggcggtgctgattatggccgggctctacattaatgtctttggcttacgtttggtgcggcctggcatggcgcgcggataaaaaaaagccccggagacggggctatacacaattatgcgtgtaatggcatcacaggtcgtgctgctggtagtacggcacgccaagttcgtcagatttatcattaccagccgccatatgattgaaatcaaacggcgaatcattatgttcggaagggataatcattgtatcacgctggttttgacgcaccggcgtggtgttttgctccgcatagctgaggctggaggccagcgacaagagtacgatagctgcggcagcgaatagtttcatgatttcctcaatacgtcttttatagtgcaggcgattaacatcagttatttagcggatgtagatagcgggattcgccaggtacattcgttatgcgatacttgtggggcggaacatcgaaatagttcttgaacgttcgcgtcagggtctgctgcgactcgaaaccatagcgttccgccaggtacaggattggctcattactctgcttgagcttctgcgcaatctccgtcagcttgcggctgcggatgtactggccgagggaatggccggtctctttcttaaacatacgttgcaggtgccacttagagtaaccggagcgctcagacactttttccagcgacaggggcgattccaggttatcctcgatccacgacaaaatactatggatagtgatggcgtcattattacgtctggacatcatcttacctcttcttatttttacggcaggaccttcttgagcagttgctcaagcatggcgacttcgtccgccgacagatttttcgttaactcctggtgtaacttctgacccacaacctgatgacactgctcgcaaagggctgcgccgtccggcgtcaactgcaccagcacgccgcgcttgtcagcggggttgggtaaccgttcaatccagcctttgcacgccaggcggtcgagcatgcgcgtcatcgcgcccgggtcgacggaaagcacggttttcagctcaacgggggtaatacatacttcgcaacgaatggagcagagcacgcgaaactgggtcgcggtaatatccataggtgagaggtagtcattgagcaggcgatcttttttctggttaaccatctggatcaagcggcccagcgggatcatttcattaaacaggtcgctggtacttttcataatggttgcccaggcaagtaattagttgcaagtgatactattgcccaggcaatcataagtcaacattatgaattggccgatgccacgatttgctaaaatggaaaagtacgatgtgggtcactctttatgatttttctaacgcttgttatttttttgcagaagtgatttatcagcaggctggcgtcaaatttgttgaagccgatatactcacggaatgaaaccattcttaaaaaatgaatattaacgggactttaattaactatgttcgatttgtttaaagcaatagggctcggcctggcggtgcttttaccgctggcgaatccactcacaaccgtggcgctgttccttggcctggccggtaatatgaacaacgccgagcgtaataaacaggcgttaatggcatcggtgtatgtcttcgccatcctgatggtgtcgtggtatgccggtcaggtggtgatgaatacattcggcatatcaatacctgggctgcgtatcgccggcggattgattgtggcctttatcggtttccgcatgctgtttccccagcaaaaagcccacgattcgatggaagcgaagatcaaatcggaagaactgcaggatgaaccgaccgccaatatcgcctttgtgccgctggcgatgccaagcaccgccggtccgggcaccatcgcgatgattattagctccgcctcgaccgttaagcacggcgtggacttcccggagtgggtggtgctggcggcgccgccgatcatctttttgctgttaggggtgattctgtgggcttgtctgcgcagttccggcgcgattatgcgtctggttggcaaaggcggcatcgaggccatctcgcgactgatgggctttctgctggtctgcatgggcgtgcagtttattattaacggcgtgctggagatcatttcgacctggcatccctgaccgcccgcgatgcgcagagaaaaaaagcccgccggcgcgataccggcgggcttttttgtgcgacggaatcaggagtggtgcggctgatggtcttccagcgataccggccagcgacggaatatcatcagcgaccagaccagcgcgaccagcgccggaatggcgccgacgtagccgacggaggccatggaaagatgcagactcacctggctgccgaccagcgccccggcgcctatgccgatattaaagatgcccgagaacagagacatggcgacgtcggtggcatccggagcggaggccagcactttcacctgcatgccgagaccgataatcatgatcgccaccccccagaagatgctgagcagcatcaggtgctgcgggttatgcgaggccggcagcagcagcagcaggcaggcgagcagcagggcaatcgccaggcttatcagccccgacgcgtgctggttaccgagtttaccgaacagaatgctgccgataataccggccccgccaaggatcagcagcagtacggtggcaaagttgccgctcaggcccgctaccgtctggacaaagggctcgatatagctgtaggcggtataatgagcggtcaccaccaccacggtcagaatgtacacgctgaccagcgccgggcggcggaacagcaccggcaggcttttcagcgagccagaatgttcgctcggcagggtcggcagcagttttacgaggcaggccagggtggctaacgcgccgaggccgatcgccaggaaggtcatccgccagccaaagtactggccgataatgcgcccgatcggaataccaaacaccatcgccagcgcggtgccggtggcgatcaggctcagcgcctgcgcccgtttgcccggcggggccatgcggatggccagtgccgacgttatcgaccagaacactgcatgcgcaaaggcgataccaatgcggctgatcactagcacgtcaaaattccaggcaaaaaacgacaggacgtggctggcgataaacagaataaacaggccgataagcaggcgccggcgctccactttgctggtcagcagcataaacggcagcgacattaacgccaccacccatgcgtagatggtcagcatcatgcccacctgggcggtttccatgccgaagctgtcggcaatatccgacaacagaccgaccggggcaaactctgtggtgttaaaaataaacgcggcgatggccaacgtcacgacacgtagccacgctaccttgcgtgagaccgtattcgtagtcataagctctggactggtgattcagggaaagatgtgacgctgatcttaaaacgattgttggcgaaaagacaatcattttgtgatctgcgtctcatttcatcgcaaggggctggccgcggttaagcgattaattttgctatggatagtgtcaagggggcgcttttatgtcatgttgaaggaaagtaaaaaaagtaaggacagggtatgcaggaaattcaattttatctggtcgatgctttcagcgataaaaactttggcggcaatgccgcggccgtctgcccgctcagcgagtggttagccgacgatgtgctcctgaaaatggcccagcagcataatcaatccgaaacggctttctttgtccgtaccgacgagggctatgagctgcgctggtttaccacactcgctgagatcaatctctgcggtcacgcgaccctcgccgctgcgcacgttattttcgaatatctcgaccatccttcggcgacgattctctttagcacccgttttgttggtgagctgcgggtcacccgtaatggcgactggctgacgctcgatttcccggcgtggtcgacctccccggtggaaaacccgccggtggatctgctgaccgggttgggactcgaggccgccgttgaagttcgggaaggacgcgattatctggtggtgctggcggatcgccagcaggttgaagcggtgcgaccggatatggcgcggctgcgaacgcttggcaaaatgatctgcgtcagcgcgccggatgaagagtatgactttatcagccgcttcttctgcccgggagaaggggtgccggaagatccggtcaccggctccgcccatagcatgctgatcccctggtggggcgaaaagctggggaaaaccaccatgatggcgcgccaggtctccgctcgcggcggcgacctgcgctgccagtggcagggcgaccgtgtgctgattagcggccaggccaccacctatatgcgcggaacggtttacctgcgttaatcatggcccccgcgtcgccccggagagcggcaatctacttccgctccccggggcgacatagcattagcccagcgatgcgccgccacacatcaccagctcctgtccggtcatcgccgatgcgccctcgctcagcaaccagctcaccagagagaccacttcctgcggagtaatcagtcgcccaagcggcggaagccgcggcggggaactttctctgcctggctgatgaagcatcggcgtatcggttgcgccgggggccacgacgttgaccgatatcgtcaccgacgcccacctgccggataaaacccgcgaggcgctggagaccctttccccgcagctgatcattgccgactgactcgcaggctgccgtcagggcagacgggcgatattggccttgatcaccgcgatcgactggctgaacttcgcctgctcttcgccggccagctgcagttcaatgatctgctttacgccaccctgggccagcaccgccggcaccccagccgccgcgccgctgaccccgtactcgccgtcaagaatgcaggagaccgccagcgcgcggtggctgccggtgaagatattgcggcatatctcggcgatggtccctgccacgccatattcggtgcagcctttacccgcgtagatctcaaatcccagtttgcgcactttgtcagccatcgcctcgcgatcgagcggcaggccggtgcgctgctggtagaggtcggcgattggcgtgccatataccgaggagtgcgaccacaccggaaactgggtatcgccatgctcgccgaggataaaggcgtcgatgctctgggcgccaatctccagttcctgcgccagcaggcgacgcaggcgggtggtatccagccagacgccggtgcccagcacctggctgcgcggcaggccggaaagctgccatacctgccaggtgatgatgtcgcaggggttggtggccaccagaaagatgccgttaaatccgttggccatcatcgtcggcacaatgctcttcacaatcttcgcggtggaggttagttcatccagccggctctggccggggcgcagcgcgccgccggagacggtgatcaccgcgatatcgacatcggcgcagtcgctggcctcgcgggtggagatggtcatcatccccggcaggtaggccgcggcgtcgctcaggtcctgagcgtgggcctcagcgcgctgttggttaaggtcgacgaggatcagctcctcgcaaatgctctggttgagcagggcgtaggccgccgacgcgccgacattgccggcgccaataatcatcactttacgggctttggtgtgcatattcagatctcaagtacgaacagcaggggataaaattactgtgtttcagttggttagcgcaataggcgggcggcaatataagttaatgctatgtcgggaaaagccgccggccgcgctacagtggggtaaaaaaggagctcacctatgtacaccatcaccgacatcgcccctaccgacgccgaatttatcgccctgattgccgccctcgacgcctggcaggagaccctctacccggcggagagcaaccacctgctggaccttagccagctgccgccgcagacggtcatcgccctggcgatccgcagcccgcagggcgaggccgttggctgcggggctattgttctcagtgaggaaggctttggcgagatgaagcgggtctatatcgatccccagcaccgcggccagcagctgggagaaaagctgctggcggcgctggaagcgaaagcgcgtcagcgcgactgccataccctgcgcctggagaccggtatccatcagcatgcggccatcgccctctacacgcgcaacggctaccagacccgctgcgcgtttgcgccgtatcaacccgatccgctcagcgtgtttatggagaaaccactgtttgccgatcttcgttcagcagcgctataaacgcctccagctggcgggtcttggcgccccggcgccacaccagccaggtggtgagccagcgccactcttcggccagcggccaggcggaaacctgctgatggccgggcatactctccagcatgctgcgcgggatcaacgccaggccggcgccggcgatgacgcaggccagcatcccgtggtaagactccatctcgtggatcctgcccggggtcgctctgtcggcatgaaaccagctctcaaaatgccggcgataggaacagttggcgcgaaaggcgtagacgttggccccgttcacttcgctggcgcgggtgatgggtgcgtggccgtagggggcgacgatcatcatctcttcagggaacaccggcagcccctccaggcccggatgcaccagcgggccgtcgacaaacgcggcgctcagggcgccttccagtacgccgtcgatcatcgtcccggaagggccggttgagagcgccagatgaattttcgggtagcgctgattaaagtgggccagagtgctggggatccgtaccgccgcggtgctctccagcgaaccaagtgaaaacagcccctggggttcgtcgcccgccaccaccattcgcgcctcgtccaccagggcgaggatctgctggctatagcgcaaaaagctgtgtcccgcaggcgacaggcgcaggcgctggttctcgcggataaacagctcaacgccgaggtcggcctccagctggcggatgcgggtggtgaggttggacggcacgcgatgcactttctgcgccgcctgggtaatgctgccggtgctggcgacagcgttaaacatctctagctgagtcaggtccatggtattcttcttttgtgaatgcgttgcttaatattattcattttcaatgaatggaaaggtaagccagaatacggacacttcgcaagcaacgagagagaataatgatgaatttatctgcaacgcacgccgtctccgtcaatccgactaccggtgaggtggtctcctcgctgccgtgggccagcgaacgcgaggtcgacgcggcgatcacgctcgccgcggcgggctatcgccagtggcgtcagacgccgcttgccgaccgcgccgatgccctgcgccgcatcggggccgcgctgcgcgcccgcggtgaagaggtggcccagatgatcacccttgagatgggcaagccgatcgctcaggcgcgcggcgaggtggcgaaatcggccaacctctgcgactggtacgctgaacacggcccggcgatgctggcgacggaagctaccctggtggaaaataaccaggcggtaatagagtatcgtccactgggtgccattctggcggtcatgccgtggaacttcccggtctggcaggtgatgcgcggcgcggtgccgatcctgctggccggcaacagctatctgctgaagcatgccccgaacgtgatgggcagcgcccgtctgctgggcgagatttttgccgccgccggcctgccggatggtgtatttggttgggtgaacgccaccaatgacggcgtttcgcagattatcaatgacgaccgcatcgcggcggtgaccgtcaccggcagcgtccgcgccgggaaggcgattggcgcccaggcgggcgcggcgctgaagaaatgcgtgcttgagctggggggatccgatccctttatcgtgctcaacgatgccgatctcgatgaagcggtaaaagccgccgtcaccggccgctatcagaacagcggccaggtgtgtgcggcgtcgaaacgctttattctcgaagccggcattgccgaggccttcacccgcaaatttgtcgacgccgtggcggcgctgaagatgggcgacccgcgcgatgagcaaaactacgtcggaccgatggcgcggttcgatttacgcgatgaactgcaccagcaggtaacggctacccttgatgaaggagcgactctgctgctgggcgcggaaaaaatcgaaggggcgggcaactactatgcgccaacggtgctgggcaacgtcaccgccgggatgaccggctttcgtcaggagctgtttggtccggtagcaaccctgaccaccgctcgcgacgctgaccatgcactggccctcgccaacgacagcgagtttggcctgtccgccacggtctataccaccgacgaggcgcaggcccagcgctttgcccgcgagctggagtgcggcggcgtcttcctcaatggctactgcgccagcgacgcccgcgtggccttcggcggcgtgaagaagagcggttttggccgcgagctgtcgcattttggcctgcacgagttctgtaatgcgcagaccgtctggaaagaccgtcgctaatcaacgttagcccctgacgaccgtcgtccacgtctgctatactcgcccaccgaattttgatggtgggcaaggagccgcgtgtggcgacggttatcaataatgcaatgctggaagccattctggcagaaatcaggccgctgattggccgcggaaaagtggcggattatattccggcgctggccagcgtcagcggcgacaagcttggtatcgcgatcagtacggtggacggtcagcactttgccgctggcgatgcccatgaacgtttttccatccagtcaatctccaaggtattgagcctggtggtggccatgaaccactatcaggaggaggagatctggcagcgggtggggaaagatccttccggccagccctttaactcgcttctgcagctggagatcgagcagggcaaaccgcgcaacccgtttatcaacgccggggcactggtggtctgcgacatgctgcagagccggctcagcgccccgcgtcagcggatgctggagattgtccgccgtctgagcggcgtggccgatatcgcctacgatccggtggtggctcgctcagagtttgagcattcggcgcgcaacgccgccatcgcctggctgatgaaatcctttggtaacttccataacgacgtcgccaccgtgctgcagaactatttccactactgttcgctggagatgagctgcgttgagctggcgcgaacctttctatttctcgccgaccgcggcattgccccgcatctcgacgcgccggttattgcgcccatccagtcccgccaggttaatgccctgatgatgaccagcggcatgtaccagaacgccggtgaattcgcctggcgcgttggcctgccggcgaaatcgggcgtcggcggcgggatcgtggcgattgtcccgcaggagatggcgatcgccgtgtggagcccggagcttgacgacgccgggaactcgctggccggcgtggcgatgctggaaaaactgactcagcggatggggaggtcggtgttctgatggtcgatcaggatcgcttgtttgcgcgcctggcgcgctcgacgtttcgctcacgcttccgtctgggggggaaagagcggcaatattgtctcgataagggaccggaggtcatcgatcggcatgccgcagactttattcgccagcggctggcgcccgctgcgccgatcaatgatggcaagcagacgccgatgcgcggtcacccggtgtttatcgcccagcacgcgaccgctacctgctgtcgcggctgcctggaaaaatggcatgccattccccacggccgcgcgctgagtgagccggagcaggactatatcgtgcaggtcatccaccgctggctggtgctacaaatgaatgcgccgtctgtgcgctaatttgcatttgatcggcgccggagtatgcctgataaatattctcatgttatgataatccgctaactaactattaacataataatttcctgaaacaattagacggataattactgaatgtcttcactgtcgattcggtcatttacgctgtttcgtgaagaacaacccgtgcgcgatgcattggtcttatttacgttaacgctactgctgcattttcttggcgctatgctgcgtctggtgcaggagctctctttcttctggccgctcaatgcagtgatggccgggatttttgcacgctatgtatggcttaaccgcagctatttttatgccgtctgttttgcggcaatgctggtctatgacggattaacctcgcgctggggaatgggctttgcctcattgctgattaacttttccaatattgtctttattgtgacgctggcgcagctggtgctgtgggataaacgtcgcgccgactccatgccgggcccgataaacgcgcttaatttattctgtttctgcctgttagccgccttactgtgcgcagcggtcggcgcgctggggtcggtggatgttgaacgcgccaccttcgttccccagctggcggactggtttagcgaacagttctcaacggcagtattaatcctgccctttattctgaccctgacgctgccttcggcattaagcggttttcgctttcgccagctgctgccggtgctggcgctggtcctgtcaattgcgcttggcgtggcggtaggcggcgcgggcagcattaccttcccgttgccggctttgatctggtgcgctgtacgctatccgctgccgctgacctgtctgctgacttttctcactggcatcggcgaaatactgctggtcgctaattcgttaattcacttttcgccagatgcgcgaatgcagccgtggcagctgttctccacccgcctcggaattgccgccatgctgattagcccggtgattgtcgcatccagtgtcgaagcgattaacacgctggtgaagcagctggccctgcgcgccgattttgactttcagacccgcgtctattcccgttccggactgagcgaagcgttgaagcgtcagacgctgccggcggataagctgctgacggtgatggtgctggatatcgatggcttcaaacgggtgaatgatgctctgggccatgaaggcggcgattgcgtgctgacccagtttgcccagcaggttcgacagctggtgggtgagcaggggatggtggcccgtatcggcggcgaagagtttgcggtggccgccgtcgtcgacagcgcccagcagggctatttgctggcggaaaagatccgtcacggggtggagtcgcagcctttcggcctgggccagaacccgatccacctgaccatcagtctgggactggagacgcgcgaggtaggccacgcccgcatcaccgagctgtttaaccagctgctgttggcggcggacgatgagatggtgaaagccaaacagagcggtcgtaaccaaatttgtatgccgacgctgaccgaaagcgcgccataagaaaatcctatcgggatcctacttgtgctaatttttggttaaaaacatagtgatgtggtcgataacagggagcttttatgaccacatccttttcactgcgcacgctctcgcgtgacgatattctccatcacctcccggcattaagcgagatcctggcaagctgcgtcaacggcggcgcctcggtgagctttatgctgcctttcgcgccgcaaacggcgataacgttctggcaacgcactgccgacagcgtggcggccggggagcgcattgtgctggccgccttcgacgcggaggaacgtcccgttggcaccgtgcaacttatcaccagtcaaccggaaaaccagccccatcgagcggatgtcgccaaattattggttcaccaaaatgtccgccgcaaggggatcgcccaggcgttgatgagcgagctggagcgcattgcccggcgggaaaggaagacggtgctggtgctggacacggcgaccggcagcggggcggaacagttctatgcccgctgcggctgggaaaaagtgggggaaattccgcgctatgcgctgatgcccgacggcgaaatgactgccacctcactattctataagtttctgccctgacggccgctattgcagattgctttgatcaaaacagggtttcactggtagaaaaacctgataacttattggaccaattactcaggttgtatgactactattagagggaacccattgtgaaaactttaaaccgtcgtgatttccccggcgcgcagtaccctgaccgtatcatccagtttggggaaggtaacttcctgcgcgcattcgttgactggcagatcgacctgctcaacgagcataccgacctgaatgcgggcatcgtggtcgtgcggcctatcgccacagattttccgccttcgctgaacacccaggatggcctgtacacgactattattcgcggcctgaacgagcagggcgaagcggtcagcgatgcgcgtcttatccgctcggtcaaccgggagatcagcgcttacgcagacttcgacgcttttttacgcctggcgcataacccggagatgcggtttgtcttctccaacaccaccgaggcgggcatcagctaccatgccggggatcggtttgacgacgcgccgccggtcagttatccggcgaaactgacccgtctgttgtttgagcgttatcagcatttcgccggtgcggccgacaagggatgggtgattattccctgcgagctgatcgattataacggcgaggcgctgcaggcgctggtgctgcgctatgctagcgaatgggaactgccgcaggcatttatcacctggctgacctcagcgaataccttctgttcgacgctggtggatcgcattgtgaccggctatccgcgtgatgaagtggcggctctcgaggcgcagaccggctataaagatgctttccttgataccgccgagcatttctacctgtttgtgatccaggggcctgcctcgctggcggccgagctgcgtctcgataaactgccgctgaatgtgcgtattgtggacgatattaagccgtataaagagcgcaaagtggcgatcctcaacggggcgcacaccgcgctggtgccggtggccttccaggccgggatcgacaccgtgggtgaggcgatgaacgatgcggagatttgcgcgtttgtcgaaaaagcgatttatgacgagattattccggtgctggatctgccgcgcgatgagctggtgtcattcgccagcgccgtgacagggcgcttccgtaatccctatattaaacatcagctgctctcgattgcgctcaacggcatgaccaagtaccgcacccgtattctgccgcagctgctggcggggcagaaagcgcatggcgcgctgccgccgcgtctgacctttgccctggcggcgctgatcgccttttaccggggagagcgggatggtgagagctatccagtacaggatgacgccgactggatatcgcgctatcaaacgctgtgggcccgccatcgcgatggccagatgagcactcgcgagctggtcaccgccgtgctcagcgtggcggatcactggcagcaggatctgagccagaccccggggttggtggagctggtgactgccgaccttgacgctatcctgacctgcggtatgcgcgacgccgtcaaacctctgtgctgatagtccatctatacacccggctgcggccgggttgtgcaggatctttattagttacaacatactattatactaacctgtaacagccggtcagtggctcctctgcatacggctttttagtgccaaatcgttccgaacagcaggagaattatggccgaagcgcttgaacaaatatctgcgcaggaaaataatgacctcaactcatatctcctgccaatattcgcaggctaatgcattcatctgtaaggaaactctcatggtcatcgatatccgggaagtacggccccacgacaaagccgaatggcttcagctttggcaaggctacactcgtttttacggtagcccgcagccggaagaggtgaccgaatgcacctggcagcggatgctggatgtaaactcgtctgtattgggtagagtcgcggtggtggatgatgcggtggtcggcttcgctatctgtgttcttcatgagggaacctgggttaccacgccgatctgctatctggaggatctgtttgtcgatcccgccttccgtggacaaggtattgccagaaccatgattaagtcgctgcaaagcgaaggggcggacaaaggctggtcgcggctgtactggcatacgcgccgtgataatcccgcccgtcatctgtatgatgagtttaccccagctgacgattacgtacgctacaggatcacgcttgggtcctgaagcggtaagaggttgttaagcttttcccgctataacaggggaaacaggctcaggagaagcaacgatggaaaaacgtcttgaaacagtggtcaatgtgattatgtttctttcgctattggcaacggcctgggatctctcgctggtgcatcatctcgcgtggtagtaaattatatcatctgaaacgcggcgcctcttgcggcgccgcctgtctcattcatccgccatcttccctgcgctaaaactccagtcctccagttggttaaactggataaccaccatcacgtcctgcgggctgaccgccatctcatcgtctaaacgtgcgcagagccgacgatagagtccttgtttctgcgcccggctgcgcggttttccagcaaaaatatgaaacaatacgaagtaatagctaaccgagatattttaaaccgggcagggtgcgagggaatataaaaaaagagtagagtcaatattactatcaaggccatcgttttataagtatattgaaaggccagatgatcataagaaatatgtgccggaacaatgaatgatctaataaaggaaggatctaattatgtattataggaatttcatcattccctcaatcgaggcggagcgtattctggccatgaaatttgatgaagcatttgctggagtaaaaaagaatgttattgatacactgaatcaaatgggaaatggtataacccgtgcttcgtattatacttcctgcttaatggataattatcaggatgtttgttctaagttaaagcaagaggacacaagatttattgcagggctggcgcagttagttaaaagccgtgatatcattttccaaatgattaaaatatatatagaaacctactttcaaaataaaaaagaagaaaaagctcaatatattctcaagaagcttgtcggcgcgggagtttacatatcatcttcaggattaactaatcgtattttaataatggcagtagcaaccatgatttgccagacttccaggtttaatactgttgtatatgggcgtatcaacagggcaaggtcattagtccttaaagggagtgtaactgctaccgcagtggtattaaacgtgtatggattgattcaggatgccgctaatagcgctgacaatttgaaaatgcataattcattttattacaatgcgttatacgctaaccatctggagatgatgtactttctcatcgaacctgtcatcacaggcgttccttatttaaatccgatgattatttctgatgatgaacttgctgaattacttattaaattaatgaggtgaatggatggatttcttgaaaagatggttaaaagaagaattcattctttttttatggggatggggtattgtattattaatcattatatttagcatgattgcagtctctctttttcctgacattgccattaacttaataggactttttgttttattaatcattgggtttcacgttgtcgtttggtttaaagttaaaaactgatatgaaagaggaggggtaatgtcaaatccagcatatttatggttaactgatgagaatgattcgcctattataggttcttgcctgatgcccacacgcacgggttccatcgaattgcgcgcagtgaatcatcatgtttggttacctaccgataataatacaggaaagctgacgggaacccgtcttcatacaccggttaaaattcaaaaagagtttgacagaacaacacctttgctatttagggctctttgtgaaggtcgaacattaagatcggcaacgctaaaaatgtacagaataaatgaggcgggactggaagttgaatattttaacatagcgatggcgaatattaagattacggcaatcacaccaaatttacatccggccggaatgacaagtactcaccttgaagacattgatttccgttatgagacgatcacctggatatacacagaagggaacatcatgtatcgtgattcatggaacgatcgctgttgtgcatggtagcaaatgatatagtgctgaaacgcggcgcctcttgcggcgccgcctgtctcattcatccgccatcttccctgcgctaaaactccagtcctctagttgattatactggataaccaccatcacgtcctgcgggctgaccgccatctcatcgtctaaccgcgcgcagagccgacgatagagtccctgtttctgcgcccggcagcgcggttttccggcgaaaatatgaaacagcacgaagcgggcgctgcgtccttcgctgaggtagtgcgggtcgtaaatgcgctgctcgtcggcggcccgttcgataaactgaaatctatctgctgacggaacgtcgaactccgccaccagacactcatgaaagagcgccgacaattgagcaaactccgcgggacgccaggctgtgccaagcgaaattcgggtcaggggcatgacgcctcctgcgcgttcaggcaggtcagggcgctggccgccgccggccaaccggcatagaacgccagatgggtaaacaattcgacaatttcttcccggctcaggccattctgatagccgaacgcgatgtgccacggcagctgttcagttttgccctgcaccgtcagggcggaaagggtgatcaggctgcgttcgcggggcgacagctcgctacgcgcccagatatcgccaaacagcaccgtttcggtaagctcggctagctttggcgcgatagcagccagcgttcggcgatcgacaggaggagtactcatagtgattctctttgcaggttaaaggagtcatcactgtcgcacgctgactaagatattgaatatcgcaacgttcgggattatcaatcctgtaaatcaggatggtatagccgatcctttacacctttcatcactccgcttttctgcccacctatcccaacggtcaggcggcgatctttcgcgccacgataaacagccgtgggaaacgcaggagcaccttcccgttacactgtaacggatagtgtgcggccagcaatgcgagatagcgtgtgagaaaggcgcttccggcctgctcgtccaggcctgccagataggggcgtaacccggtgccctgcagccagtcgacaatcgcctgatgagaagcaaggggatgaaaataggtggtgcgccagatatcaacttcgcaaccctggcggctgagcagatcgtaccaggcggcgggcgggagtaacggctggcgtccacggtccggcaaccccatctcgctggcaacctgacgcatcagggtatgggaaggttcctgccagttatccggcatctgcactgccagcgttccgttgtccgccagctggtttaccagatgggggaaaagcgtctcatgatccgtcagccactgcagagaggcgttggcatagatcacatctggcggttgcgcaggccgccagcgggcaatatcggcattaatgaattcgcagtcgggtaaggcctgcgccgcctggaccagcatggccggggagttatcgataccgacgatcgtcgccaacggccaggcggcgcgtagcaggcgggtgctgtttcccggcccgcagccgaggtcgacggcgtgctcgacctgcagatgggcaatacgcgagagcaggtcggccgcggggcgggtacgttcagcgtcaaattgcagatacaacgaaggattccagtcggccatcgggtgcagttcctgtgtgaggagggagacagggtaaagcatagaacgcgtcaggcggcatgtcagcggttaatgaacctcagcggtcacctttgtgcgtgacagtgtcacaaaatagaacgtggctggattgcgcctgcgctgttggccgaacctgggattgagacatggcaggaaacgtctctgcgcccgtggcgggcgcaggagcctattcggcgtttttgagcgcctcggcgcggctggcggtggcgtagacaaaatccagcatcggctcgagatcggtgtcatagccagcctgaataatttttcctcgcagccattcgatttcactggtgatatcgggaggaaaaatgttgttatcctgcgcccggcgcagccatttcagcagaaagttattctttcccctgataccacccgcttttttcgattttccgtgcatcttcagcgcgaccaggacgcagtaatagaaatgaacgcgctgattaaaactttggtgcatgtctgtgtttcccgccagaatcaggaattcaccgtgtgggtcagtgattcggattggactacggtaccgggctggatcgttgcgcgaactctgttgtctaccagtaccgtccatgcatctgttgccagacgctgacgggatgttggcacggaagccgaatcgtcgtcaattgccgattcattttttgccggcgtcatcggaccgcggcagcccgcgagccgggccacactactctctggcgacaagccgctgttgccgatgtacgcggaaaatcagcaggaatgcgagcgccaccacgatcgccgccagcagatacagcgtggcgagatcgtagaacccggcgacccagccggccagcggcccggtcaggcccagcgccagatcaagaaacgccgagtaggtgccgagggcggttccctgattttgctcttcaacctgttttaccgcctcaacccctaaggccggaaagaccagcgagaaacccgaaccggtgagaaaggcgccgacgccggccatccatgctgatggcgccagccagataagcagcaggccgagactttcgatgatgaagcaggccagggagaccgggactccgccaaagcgggtaatggtatttcccagcaccaggcgaacgcagataaagccgacgctgaacagcgaaagggtaaacgcggcgccctgccagctgtgcgcggcgaagtagagggtgataaaggtggcgataacgccgaaaccgacggtgccaaaggccagccccaggccgtaaggccagatttttcgcaccaccgcatgaaagggcgctctggcgccggcggtcaccttgacgtcctggcgggtacgagcgaacagcagaccgatggccgcgaccagcactaccaccgtagcaaagccgctgatgccaaaatagtgattgagggtaactcccagcggcgccccgaccgccatcgccacataggtcgccacgccgttccaggagataacccgtgacgtgtggatcgcgccgacggttttgatcccccacagggtggcgccggtggcggtaaagctctcgccgacgccgagaaacacccggcccgccagcagcgcggcaatggccagcatcggcgttgcctgcaggactaccgccagtagcgtgaaggcgccactgagcaggcagcagacgatcccaaggctgaccacttttttcggcccccagatatcggtatagcgcccggcgtgcggccggcttatcagcgtcgatatgtactgcagactgatcacaattccggccacaaaggtgctgtagcccagctgatagtgaatatagcccggcagtacggccagcggcagaccaatggagagatagcagatacaggtaaaaacaacgatcgaaataatgcgcaaattgagttgtgtagtgctgacggaagtgctcatagggataagaggttaatacaacgggatgtgtagcatagcgcgccgtgagggcgctggcgaggcgcgacagcgttttatcggtaaccgacgggaacgatatttgtacgaatgtaaataactgcttttacagcgcttaacgcccgcctcgctcagcgtcagctcgccgccatacccgacgaatcacacaccatgccccaggcgcggttttgcaataccgtgcggtagccgtcccggtcgacgaaagtgacgccattgacctcccagtaagggttaaacgccgtaacgcgcagaaatccggcggcgtccatggctgcgcactgtgcctcccatgccgcctgctgcggatagtacagcaccagcagatcttcatcgcctgccgagggggtgacgggatggtggcggcagtgggtgaattccagatgccagcccgcttcgggcgcgccgagcattatcccgctgaatccttcatgatcggtaaagctgccgagctgctcgagtcccagcccggcgcaatacatgctggcggtggtgtccagttcgctgaccggcctggcaatgcgcatatgacagaacgacataatgactcccgtgagcataagttgagttgatactgtaccggtaaatcggcccggcgtgtgttaagccgtgcccaggcgccaccttctctctgtaaataccatagcggactaacatccgccttgcgccaacattacctcttaatcataataaaaaaagaattatacaatattattgttcttaaattgagaatcactgtggggtggtggatgaataaccaatcgcgccaggccttatggctggcactggctggatcgatagtactgatgatcggcatgggctacgggcgctttgccttcaccggcgtgctgccgcttatgcttaatgaaggtctgttaaccctgcacgagggcaatctcgccgcgtcggccaattacgctggctatctggtcggtgcgttgctgctggcgcgggtgcagcctggggccgccacccgactgagtattatctccgccgggttgaccatcgccagcctggcgctgctggcctgggtgagctcgccgtggaccattattacgctgcgcgccgtcgccggcgcgctgagcgcgataacgctaattgcaggttcgctgtggctgctggaacatatggggcatcatcacggggcgccgttgctgtatgccggggtggggctggggatatttatctccgcggaggggatcgcccttggacatgccctgagcctcaccagccagcagatctggctgctcagcgcattatgcgccggtctgctgctggcgctggcgatccgttggctactgactccgccggctgcactggtgagggtttcccatgttgagacctccctgcctgcgtccgggagcgatacccgtcgcgcggcgtggcgactcttgatggtttacggtctggcgggcttcggctatatcatcaccgccacttatctgccgttgtttctgtccggttcgctgcagagcgttgacccggtccatctgtgggcgctgtttggtctggcggccgcgccgtcctgcctcatctggcataagctggtgctaaagtggggataccggcaagcgctgacccgcaacctgctcgtccaggcgcttggcgtgatccttccagcctgcagcgcttcattgctgttttgcgtgctaagcgcgcttttggtgggctttacctttatgggcaccgtaaccattgcgctaccgaaggcgaaaagtctcagccatcaggtgagcttcaatatgattgccgcgatgactgcactgtacggtgtgggacagattgccgggccgcttatcgccggcgcgctgtatcagatcgcggcttcatttaacccggcgctctatgccgcggcgctggcgctgctgattgccgcagggctggtctttaccgaacgccaggcttagccaatcgccacgctttgcagcagcttgcgccactcgctcagggcgggggcgctcaagccgctgcgccagataagctgggtggtcgcctcgcacagcggttcgctaaggcagttttcgggaagcgtcatcagcgacagcacgctctgcggcagcaggcaggcgtagcgcccggacgccacgcaggcaagcatgctgtgataggaattgacctcatgcacctcgacggccgcctgctgttccgccagccagcgttctcccagcgcgcggtagctgcagccgctggcaaatgccgcgaaccgcagcggacccggggtctgcggacggaccagcatcagggtttcataaaacaccggggtgaatgccagctcgtcgggacaggcaggttgcccatcggcccctggcggcaggcagaccagcgcggcatcaagggcggcggttaacaccccctcggttaactggctggttggttgggtgatgagggtgatatccacctgcgggcactgctgttggaagcgggtaagcagcggcggcagccggctggcggcggtcgcctccatcgcgcccagacgcagactgccgcctggggttgtcggatgcagagcctgctttgcctcttccgccaggctcaggatccgccgggcatagctgagaaactgcacgcctgccggggacaacaccatttttttgttgccgcgaacgaagagctcaacggcaagctcctcttccagctgctgaatgcgggtcgtgatattggactgtgcgcggcccagccgttttgctgcctgggtgacgctctgcgtttctgccacctgaatgaagatctcgagtgtgctgtggttcatatttttcttctcaatacgataataatgttgatcttaccatctttaaaggagatggtaagcctccggcatcgttaatgcatgaggaaaccatgagcaacccgctgctttcgcttcttgatattgattatcccctgattcaggccccgatggcgggcgtctccacccccgcgctggctgccgcggtaagtaatgccggcgcgctgggctcgctggggctgggcgcttcaaccgttgcccaggcggaagcgatgatagtcgccacccgccagctgacggaccgtccgttcaatgtcaatctgttctgccatgcgccgccccggcgcgacgcccggcgggaagccgactgggcaacaacattacgtccccattttgcccgctatggcagtacgccaccggattcgttaagcgagatctaccagacatttatcggtcatgcgccgatgctggagctgcttctcgacctgtcgccggcggtggtgagctttcattttggtcttcctgaaggtgagacgatccagcgtctgcggcggcaggggatcgttaccctggcgacagcgacttcgctccaggaggcgctgctgattgaacagcaggggatcgacgtggtggtcgctcagggctatgaggcgggtgggcaccgggggatctttgctccgcaggcgcctgacgcgcagctgagcaccttcaccctggtgcaacttctgcggcgtcgactaaccatcccggtggtggccgccggaggcatcatggacggagcggggatcgccagcgtgatgcagttgggggcgcagggcgtacagctcggtacggcgtttttactgtgtccggaatcggccgccgacgccggctaccgcgcggcgatccacaacagtcttgacgggcgtacggtgctgacctccgcgatatccgggcgtccggcacgctgtctggcgaatgccttctgtgcgctgggggaaggctatccggcgagcgccgtgccggattatccgctggcgtatgatatcggcaaagcgctggccgccgccgcgaaagcccagggcgtccatgagtatggcgcccactgggccgggcagggggtggggttgatccgcgagtgtgacgccgccactctgatccgccagctggcggcagagagcggctggaactaatgactgacggctagcggcggtgggccaggctacgcaccagccgatcgccggccatttgcaccccctggaccatcgccaccaggatcagcactgtgccaaacatgacttcattattaaaccgctgatagccgtagcggatggcgaggtcgccgagtccaccgccgccgatcacaccggccatggaggagaaaccaatcagcatcacgatggtcagcgtgatcccggccagcagcgttggcagggcttccggcagcagggatttaaaaatcacgtgccagacgttgccgcccatcgacagaatggcttcaattctcccgtagtccacctcgtcgagcgcgttttccgtcagacgggcaaagaacggaaaggcgccgatggttaccggcacgatggcggcggtgctgcccagcgtggtgccgacgatcagccgggtaaaggggatcagggcgatcagcagtacgataaacggcagcgacctgccgatgttgatcaccgcgcctaacagcgcgttcagtttcggcatcggcgccagcccgttggcgcgggaaataaacaacagcacgccggtgggcagcccgatcagcaccgtaaacagggccgccaggcccaccatatagagcgtatccagcgtgccgtcgagtaataacggccacaaatcttcccagctcatgctactccgcataatggcctcccctgaacgccgtggcgggtaagaaattcctgttcagcctgcgggtcgtgcagcagcgactggcgcagccgcgaccatggggtcaccagcaggtcggcaagtttaccgctttcgacaatctcgccctgttccagcagcgccgcgtggtcacagatggttttcaccacctccagctggtgcgtaatcagcacaatggtcagattgaggcgctggttaatatccgccagcagggccagcaccgaggcggtggtctcgggatccagcgcactggtcgcctcatcgcacagcagcacttccggccgggcggccagcgcccgggcgatgccgacgcgctgcttttgcccgccggaaagctgtgacgggaaagcggcggccttttcgctgagatccaccagcgccagcagttcgcgcacccgggcctcgcgagcggccctcggcactccggcaatctccagcggcaccgcgacgttgtcagcgacggtgcgggcatgcagcagattgaagtgctggaaaatcatcccggtgcgcaggcgataatcccgcagcgccgccttgttcaactgggtaatatcctgtccgttcaccagaatgcggcccgaggtgggccgctccagtaaattgagacagcggatgagcgtacttttgccggcgccactgcgcccgagaatgccgtatattgcccctttcggtatctgcaacgcgatatcgttcagcgccggtcggccggttccggcgtaggttttgctcagcccttcgatggttatcatgactgaggggccaccgggatcaccgagccgttgtaggttttacggataaactccgccacctgcggcgaggtcagatctttcgccagcgccttaatgcgcgggtcattcgccagggctggggtggtcaccagaatattggcgtacgggttatgctcggcgctttccagccccagggcatccttcgctggcaccaggccggcttccagcgcgtagttaccgttaatcaccgccaggtcgacatcgtcgagggagcgcgggatctgcggcgattcaatctccagaatcttcaggtgtttcgggttctcgacaatatccttcggcgtcgccagggtggtggccgggtcggtaaatttagggtccagcttaataagcttctgcgcctgcagcaggaacagcgcccggctcaggttggtggtgttattcggcaccgccacggtggcgttttccggcagtgatgagaaatctttatgcttatgcgagtaaattcccagcggctcaatatgcacggtggccgcgacggcaaaggttttacccagcgctttttcctgatccttcagatagggaacatgctggaagtagttggcatccacatcgccactggccagcagttcattggcgttgaccccgctggtcagctccaccaccttcagatcgaggctgggatcgatttttttgatgtagttgaggatctccgcgtggggaaccgggtccgcggcgacgcgcagcgcggcagcctgggcagacgtccatgccagagaaagagacagtgcgacccctgccagtttaaaagcggcatatttcatggtgtgttcctttttagttatggttaaacgatcaattgctcggcgcgttcgcgaaacacgtcctgatagtagcgttccgccacgtccggatgggaacgcagacggcccttgagataattccagccgacatcgcgcagcagcggattgtgcggatcgctgtccggccctcgcgcttcacgcgccagctcgggcggcagggtgtaaaccggcaccaccgcgtcaagctgggcgccgaggaagaaggcgatggagaggcgctgctgctgcgccggcggcgacaccacgcgatggacggtagcgcgcaaatacccgttggtcgccagctccagcagttcgccaatattgaccacaaagctgccggccagcggcacggcgtcgatccattctccaggcgcgacctcaacctgcagtcctttctgctcgtcctgcagcaggaagctgagaaaccccgaatctttatgggcgccgacgccctggctgctttgggtctcctgctggccggggtagcggatcagtttgatatgctcgttgggtttctcgccgtagagctgatcgaaagcattctccgggagctgcagtgcttcggcaaaggcgcgcagcaggcggatgcccacctgggtcatttgctgttgccagtgaagtaataccggtttaagcgacggcagggcggcaggccacagattcggaccctgcaggcgctgccagcgcggggcgtcgtcgctgagggtcagcgccggacgttcggcgccgatatcaaactgttctcgccagtcaggctggccgcgcgtcagctcagaggccgcgcggttatagccgcgaaaatggggggagtggatcatcgccacctgctgtttttgcgcctcatcgagagcaaaaaagcgctgggactggcgctgaacttcatattgaagcgcgtcgtcgacaccgtggttgatcaaatagaagaagccgatgtcgcgggcggcatgacgcaggtcggccaggaaggccgctttatccgcggggtccgcgtagcgggccaggtcgagaatcggcagggtggtcgcgttcattgtgttctccgaaaacggggtaataagttatgggttgattcaggttcagggttcgggcacaacagcagcgcatggtgatttcctctgtccggggctgaacacagcttgcctcaaggccaaataagcaaccaataacgttattttctaatttatgaccgcgcggggttcagtgcttttgcgttaaatagatataggcgcgaagcgcgtaatgaagccggttgcgcccgtcggtgagagccagtaaggtaggcgcactttttaatgcggaacggacgtatcgtaatgcacagctcgaaagatcccctgcacggcgtgacgctggaagcgctgctcaatgccctggtggcgcgctatggttgggcggaaatggcccgccaggtcaacattaactgctttaaaagcgatcccagcattaagtccagcctcaaatttctccgccggacgccgtgggcgcgcaaagaggtggaggctatgtatctcgcctcccttgatgatgacgcgccggtggagaaagcggatccctgggcaaactggcagaaaaaataacccttaccacaggacaccatcatgcagagctggagcagtaaagatttcaccgccgactgcgcgtggggcgcgctggatattgccaattttcccggcaccaccgtgcgtctgcactggaccgaccaaccctatatctggcacatcaatgatggtcaggaggtgtttgccgtgatggatggtcaggtggcgatgcatgtgaaagtcgacggcgaggagcaggttatcatgctaaacgccggcgatatcttctacgccggggtgggatgcgagcatgtcgcccacccgcagggggcggcgcgtattctggtgattgagaaagaagggtcggtctgaccccgcggcgggcggttctttgcccgccgtttcatcgcccgtcagatgcgacataccgcgttgatataaattacctatcctgctttcgatatatttaattcttgtttgccaatcccatcatcccggcactatcttttgccgcagacgcctgaccaggcacaaccgcgggagagatcatggcaaccttacagtgggaccacgccgtacagtttgtgaatcagccggaagcggcgattgaaatctttgccgggcagcagctgcgggcggtggccggagggcggcatccggggtggggaacccgtaatgcgctgagctattttggcctgacgtatatcgaattcctcgccattgccgacccggacgaactgcgcgccgcgacggacaaattcctcctttcgcgcgacgccgcacggctgctgccggagaatgaggcgctgtttcgggtggcgctgcgcagcgacgacatcgacgccacccatgaccagttgcgtcgcacaggggtgacagtgtcaccgattgtcgatggccagcgcaacgatccgcagggcaatatcatccgctggcggatcttcaccatcgatggcgacactgccgggctggtctatccctttgtgctgcagtggggagaagacgacgccacccggctgacgcggctgcgcgcccagaggctggacgcgccgcatccgctgggcgacattacgcttgagcaggcggtgttcgaggtggtcaatccgcaggcggtgcgcgatcgctggcaggcgctgctgggctttccgccactgggggagcagggactggacgtgggcggccagcaatttatcttccgtgaaggggctgccaaccagctgaccgaactggtgttccgcgtcgccaacccggcgcttaaggggcagcgctttcgtgtcggcaacggcgtgtatcgctttacataaaggctgactctagcgtgccgtggcgcgcagggcccccggcggctggccggtgatgcgtttgaaagcccggctgaaggccgccagcgactgatacccgaggctgaaggcgactttttccagcgcctggccttcatgggtgatgtactgcaccgccagccgcatacgcagctcggtgagatagcgggcgggggtggtgccggtggcggcgagaaaacgttccgcgaacagcgaacgtgaaagacccgcctcccgcgccagatcttccactttccagttgaaccccgggcgctgatgcatggcgtagatcgctttcgccagccggggatcgcgcaggacctgtacccagccggtggcgttgccgcacccgcacgctacccagccgcggacaatcagcgcggccaccacgtccgccagccgggcgaggatcccggcatagcctgcctggcgggtgagcgattcccgctccatcgctaccaacagcggctggatctccggccaggtgtttagcaggctgctgacccgcatcacctcgggcatggccttgaccagcggctgcatgccgccgagctcaaagtccatacaaccgctgaaaatgacggcgcgctccgggcagtcaggctggtcgccagcgttgatacaacttaccgtgctgcacaccgtttcgctgggcagctgcgccacattgaccaccgtggcctgcggatctgagagcagggcgtgcccgtcgccgttaggaataaatagcgcatcgccgctctcgagggtgaactgttctccgctggccatgcgcagcagcaccggcccgcggctgatgaaatggaactgggctttacccgccacggcgctaaagccgacgccgaacgggcgtgcggtttcgatgcgccggtagttaacgccggagaggcgcataccgcgcaacagttcgctggtcaggtcgatggcaggctggctcatggtaattccggacgaataatcaataactgaagagtatgcatcatatatcgtccgaaagtaagtccctaagatgaccaggatgttaataaacctggagagttgtatatgagttcctgcatagctgctgacgagagcctgtctcccgccaaacctgcctggcgcgccgtctatgccctggccctcggggtgttcggcctgatcgtggccgagtttctgcccgccagcctgttaacgccgatggccagcagcctcggcgtcagtgaagggatggccggacaggcggtcaccgcgacggcgctggtggcgttagttaccggcctgctgatcgccaccgccacccgcaatatcgatcgccgctgggtgctgatgttcttttccgtactgcagatagtctccagcctgatggtcgcttttgccgattcgctggcgtttctcctgctgggccgtctgctgttggggatcgccatcggcggcttctgggcgatgtccaccgccacggcgatgcgtctggtgccggcggcccatgtgccaaaggcgctggcgatcatcttttccgcggtgtctgtcgccacggtggtggccgcgccgctcggcagctacctcggggagctgatcggctggcgcaacgtgtttattctctgtgcgatacccagcctgctggcgctgctctggcagctgtgggtgctgccttccatgcgcccggagagcgtcgggaccttctccacgctgttcagggtgctgcgccgtcccggtatgctgggcggcatgctggcgacgatcctgattttcagcggccatttcgccttctttacctacctgcggccgttccttgagaccgtcgcgcaggccagtgtcgaaggggtttcgctgatattgctcggcttcggtatcgctaactttatcggcacttcggtggcgagctatctgctgaaccgtagcctgcgtctcaccctggcgctggtgccgttgatgatgagcgttctggcgctgctgatggtgacgtttggccatctgaccgtgctggccgggctgctggtcgccctgtggggatttgccttcggcctggtgccggtggcctggtccacctggcttgccactaccgtgccggatgaagcagaaagcgcgggcggtctgctggtcgcctctattcagctggccatcagcgccggggccgccggcggcggggcggtgtttgatttgcacggcgccagcggcgtcttcaccggcagcggtctgctgctgttgagcgcgatggtgattgtcttcgccgccgtacgggtgaaaccggtcgcccgcgccgaccagccggtgacgggccgcttatcccgcgagatcgataactaaattggccgacaggctgcgggagcagcacagcgcaatatgctgctctgcggcctgtttttccgcctccgactgcacggtatcccggtggtcgacggttccctcgcgtaccggcgtcaggcaggcgccgcagatccccatctcgcaggagagcggcaccgcgacgccatgttcctgcagcacctgggcgatggttttgtcccccggcaccggccagcgctccccggtggaggcgagggtgatggtgaaggttccgtccgccgccgacgccgccgtcggggcgggcggctggaatgcttcgctgtgcaattgttcctctccccatccgaccgcccgcgcggtatcgcgaacccgggccataaatccgggcggaccgcagaagtagacccgggtgtcggcgtccggagcccccagatcctgcgccagccgctggcgcggactctgcccctcgtctgagcagtggatctggcagattccacccgctagctggcgggcgatctcggtggcgaaggcggcctcctgcgcacggctaacgtaatagtgcagcgtaaagctggcgccggacgccgcccgggcgtgggccatcgccagcagcggcgtaatgccgatcccggcggcgagaagcaccacatggccgccctcgtgcagcggaaagtggttgcgcggggcagagatcatcaatggctgtcccgggcgcagggtgtcatgaatataacgggagccaccgcgagactgcgactcgcgggcgatgcagagcagatagcgatcccgttcggccgggctgccggtcagggagtactgacggatcagcccgcagggaagatggagatcgatatgggcgccgggcgtccacgccggcagcggttgcccctcggcgctcaccagacgaacggccagatttttcgcgccctggcgccacaggccatcgaccaccaccgggagtatgtcgcgcatatgacctccactcataccagaaagaaatcgccaaaacccatcttcttcagcccgcgccggtaggcgatagagctacggtctgccggaatatgcgcctccagggtcagatccagcggcaaccgttccggacgctgggtctcgaccatcaggcggtcctcttcaaatacccgcaggttgaacgcatgtacgtcttccaccggcacgtgcagatcgaagttgcgggcaataggggcaaacatccgcgtcacccgggacgacaccggcgaggcggcgttcatgatcaccagcctggcgtcggcgggaaaatggatggtcagcgtagcggtgaacggcagatgcatttcaaagtgacgcagccactggaatccttccggcgcgcggaaatcagagctggccgggtaattgcccaccgagctccagtagtcggcaacaaagccgaacggcgtctcctgcgggctatagtccggcacctgctggttgtccggatcggcgaaggtgtcggtgtggatccacgcgaagtgggcgacatcgagaaagccttcgacctggcggccggcaaatccctttacctcgaaggccgggcagttgatttgctgaaatcccgcgtcgtcccagtgcggcatggtcggtaacggcggcggattgtccggatcgcaggccaggcaggtccagatcagcccgtagcgctcctccacggcgaagctggtgagatgcagtttggccggaatgggttgccccggactggaggggatacggttgcagcggccatcctcgccaaagcgcaggccatgataggggcagacgatgccttcttcttcatgaaaccccagggtcagcggcaccccgcggtgcgggcagacgtcgcgggcgactaccacctggcctttaatacgatagataaccaactgttcgtccagcagggtggctttcaccggggcgccggcaatatcgcaggcgcgggccaccgggtgccagcagcgggccagccgcagccagtcttccgggtcaaaggtgcaatgggcggggggcgtgggggtgattgtcttcatgatttctcttcctgctcacatcggtgattgttttattgttgtgagattattgttgtcatattagggtgttcacatccatcaccattaattcactctgctgttgcaaaaaagagtacaggggcgccatgagtccattttcccgtttcgcgcactatttcatcgccgtggcccgctgcggcagtctgcgccgggccgccgagcagctgcatatctccgcctcggcaattaaccgccagatcctgcaggccgaggaggccttcggtaccccgctgttcgagcgcctgccggagggactgcggatgaccaccgccggtgaactgctgtatgacaatctgctgcgctggcagaaggaatttcgtcagacgcggcagaaattcgatgagctgcaggggatgaagcgcggaagcgttagcgttggcatggtgcaggcgctggcggaagggggcttcgccgccgcgctggcggagatcatcgccagctggccgtggctggagctggatctgcaggtggctgacagccacaccgtcagccagaaagtgcgtcaggcggacctggacgtcggcctgatcctcgatccgcaggggcaggctggactcagcgtgctggcctttgccgaactggaggttgggattgtgatgcgtccggaccatcccctggcgggggcgaaagcgctgtctttgggcgagctcagcctggagcggcatatcgtgcccggcgcgccgctgatcgtccatgagcgggtggcgctcctctatcgccaccatgactttgcgccggagaataccatcagctgcaatgatatccggcttatcaagtcgttggtgctacgcggcagcggcgtgacgctccttagcctgctcgacgtgctggacgaggtccagcgtggacagctggcctttgtcccgctgcgcagtacgctgttgcgaccgctgaccctggcgctgtgtactgcgccctcgcgtcagctttcgcggcccgcgcaaatggccattcagacgctgagtgcggtgatcgaatccatggcgacggtcagcccagcggcccgctgaggatggtgtcgcacatgccgttgataatgcgctccccggtctcctcacgcagctcctggtaccaggcttcggtgagctgcatatccttcccgtgggtaatatcgcaccgcttgcgcgccttcagcaccaggtcacgaacccggtcgcagcgctgggcttcatactcgcgcagggcggccgcaatatctcgggtctggcggaaaacggcgcccagcaccactgcatcttccatcgccgcgcagcctccctggccaatatccggggtggtgctgtgtccggcatcgccgagcagcgcgacgcggccgcgcaccaggcggctgaaaggttcgatatcatggatttcaatgcggttggtagtctgcgggtcgagggcggcgatcagcttctgcaccggcggcgcccagccggcaaagtagcggctgaggtcagcgcgcagggtgtcacgatcctccgccagacccgccggaagcggcacatcaaagaaaaagtagaaccggccggcggagaccggcatcagcgagacgcgcttgccttcgccgacaaaggtggtccactgatcgccgggggccagcgcttcatctatctccaccagaccgttccagttgacgtagccggcgtagcggcgctgcggggtaaagcccagcacccacggacgcagtgcggaatggctgccgtcggcggcaatcagcagatcgccgctggcgctgctgccgtcggtaaaccataccgtcacgccgtcggcgtcttcttcacagcgggtgacgcgtttgccgaactgcacgctgtcccgtccccagtaatccagcatttcccgctgcagttctgcccgggagaccgggcaggggcggctgccggtgcgttcgatcagcggggcgagactgaactgggtcatgttctcgccgctgcggaaatcacgatacgccatccggcgcagcggcccgccgaaggtctccatgatgtcgcccatgccgaggtgggccatgcacttcacgccgttgggccacacggaaatcgctgcgccgaccggtttgatctctttcaccgcttcatagacgtcgcagtcgatccccgactgtttgagcgccactgccgcgcttaaaccgccgatgccggcgccaatcacgattgctttcatttttttctccttctcccgatgttgtgactgactacagcaatttgcgtaccagttcgctggagggaggaaaaccgcctgcctgaggcacagcgatggctcatgacgcaccgcatcggtgcaatgtgaggtattggttgcctttttatgaatcaaaagtttctgtatgttgcattaagaatctatcgtttcaggcgcctggttcagcagcgaagaggagtgatgcatcacgagcgtaatctaagttgatgattttggagtgataataaatttattggtgcccttttgtcgtctctggcctgctttgtgcacaagcccatgcacttctctttactacgggatatcactatgtctgacgaacatcacagtggcctgctttacggccttgaacagcggatcccaccgcttccggcctttttcagcgctctccagcatgtgctggcgggcctggtggggatcatcacgccgccgctgatcatcggtgctaccctcgggcttggcgactggctgccgtatctcatcagtatgtcgctgctggcctcgggcattggcacttttctgcagtccaatcgggtatggggcatcggcgccgggatgatctgcatgcagggcaccagttttgccttcctcggcgtgacggtggccggagggatgtgggtaaaagcccagggcggcgggccgcaggatatgatggcgatgctgtttggcgttaactttgtcgccgctctggtgccggtgattgtcagccgctttatcgaaccgctgaagaaaatctttactcccatcattaccggcagcgtgattgcgctgatcggcatcagcctgatcaaggtcagcgtcatcaactggtgcggtggggaaaaggccgaggatttcgccagcatgagcaatatcgcgctcggggcgggcaccctcggggttatcgtcctgctgagctgcgccaaaaaccgctggctgcggctctcctcggtggtggtgggcattgccgtgggctgcatcgcagcggggctgagcggtcagttccatcttcacagcctgggcgacactctgtttcgcctgccgacgctgtttccgttcggctttcagtttaacagcgcgatatttctgccggtcgccctggtgtcgctggtctgtattctggaggcggtgggcgatctgacggccaactcgctgatttcgcaacagtctgttgacgatcgcgcttttcgtaaccggctgaagggcggtatcctggcggatggcgtcagctgtatggtggcggccatgctctgtgcttttccgaacaccaccttcgcgcagaacaacggcgtgatccagatgaccggggtggccagccgctatgtcggacgctacattggcgtgattctgatcctgctcgggctgttccccccggtgggcgaactgctgcggcagatcccggcgccggtgctggggggcgccacgatggtgatgtttggctgcgtggtggcggccgggatccggattattacccagaccccgctgagccgtcgcgatgtgctgatcgtggggctggcgtttggcgcgggtcttggcgtggagtcggtgccggcgtttctcagccattttccgccgatggtcggcgatctgttcggttcggcggccaccagcggtgggctggtagcgatagcgctgaaccttattctgccgcaggagcaggcggcgacgaaaacgataaggagtcaggatgatcgcgctgagtcagtttaacagcctgagtaaagatgaggcggcggggctgctggccccctgcgtggcgctcccggcctggggcgagacgctggtgagcttgcgacctttcgccagccgccatgcgctgctgcagaccgcccgggaggcgatggctaactggggagaggatgagctgaacgcggcgctcagcgcccatccgcggatcggtgagaagccgaccggcagccaggcgcatgcggcgctgtcgcgccaggagcagtcgtcggtggacagcgagaatgagcggctcgcgcaggccctgcgggagggcaatgcccgctacgaagcccgctttggccgtgtgtttttaatccgcgccaaagggcgcagcggcgaagagattctgcaggcgctgacgcgccggctgcagcataccgctgacgaagaagtggccgaggcgcttgcccagctgcgggaaattacgatgttaagactggaaggagcgattggcgaatgagcaccctgagcacccatattctggatatttccaccggcacgccggcggaaggcgtgacggtcagcctgagccgggagggcgagacgctggcgaacctggtgaccaatgcccaggggcgtatcgccacctttagcgccgcgccgttgccggcggggcgctattgcttaacagcggaaaccggggcgtggtttgcccgcgccgggcgcgagagcgtctttacccgggcgcagattgattttgttatcggcgaggcggcagaggaccatttccatctgccctttctcatcgccccgggcgggtggtcgacctaccgcggcagctaagcccgtctgcccgttgccgggcggcgctgcgcttgcccggcctggatcgttacggagcgggcagagacagcccgtaggcccggtaaggcgcagccgccaccgggcatgtacagatggctccggcgatcatccttcctgttttatccccacacaaggataattattctcctatccccaccaggggatatccttgacattatcccctatagggtataaaaccaagtttatcccgacagggggataaatgatggtgaggaacaaggcgatgaattccccgcagatatacagtcccgtgcagctggccaattacctgaagctgctgcgccagcagaaccactggacccaggatgcgctggccaggcgcatcggcattaagcaggccacgctgtccaattttgaaaatcaccccgacaaaaccaccttaaccacgctgtttaagatcctccagtcgctgggggtggtgatgacgctgaacgccaaagctgctgagacggcgccggctcccgataacaacacggaccttgactggtaatggcgacgcttaccacctggatgaacaatgtgcgcgtgggaaccttaacccgccaggctaacggggcgcacagttttcgctatgacgaagagtggctgcgcagcccgcgcgccagaccgctctccctctcactgccgctgcagtatggcaatatcactgccgacgcggtgtatcactattttgataacctgctgcccgacagcccgcaggtccgcgaccggatcgtcaggcgctatcaggcgcgctcgaagcagccgttcgatctgctggccgaagtcgggcgggatagcgtaggggcggtgaccctcctgccgccgggggaagaggcgcacctggaaggattacgctggcagacactggacgaggcgcagctcaccgctttgctgaccgcttaccagtcggatatccccctcgggatgattaccggccaggacgatttccgtatctcggtggccggcgcccaggagaaaacggcgctgctgcggatgggcgagcagtggtgtattccgcagggcgccacgccgaccacgcatatcattaagctgcccatcggcgagatcaagcagcccaatgcgacgctggatctgcgtgaaagcgtggataatgagtatctgtgcctggcgctggccagagaactgggcctggcggtgccggaagcggagatcatcgccaccccgcggatccgcgccctggcggtaacccgcttcgaccggcgctgggcgcaggagggacgggtgctgctgcgtctgccgcaggaggatctgtgtcaggcttttggtcttccttcagcgatgaaatatgagtctgacggcgggccgggtatcgccgcgatcatgacctttctgctgggctcgagtgaagcgctgaaagatcgctatgactttatgaagttcatggtcttccagtggctgacgggggcgacggacggtcacgcaaaaaacttctcaatttacctgttgcccggcggcagctaccgcttaacaccgttctacgacattatttcggcgtttccggtgctgggcggcacgggactgcatctgcgcgatctgaagctgtcgatggggctcaatgccacaaaagggcgtaaaacagagattaacgccatctatccgcgtcattttctggcgacggccaaagcggtgaactttccccgggagcagatgctggcgatcctccaggagtttgccgggcatgtgccgcaggcaatcgaaagcgctcgccggacgctgccggcggacttttccagccacgtctggcaggccattacagagaacatgctgaagctgcacgcccgcctgcagcaagggctgcaggcgctatagcagagccggctggcggctagctctgcggctgcccccagcggctgcgcaaatagttaaccgcctgccgggtttgcggctgattgaggttgttttcgcggaacaggatggtgccctggatctgcggcagagtctcattgagatcgagctgctttttcagctccggcacgccgccatccaccgtccagtcaggctcgtttttggacggttcacccaccttgtacagcgccacgccgatatacagccgggtatgggtcggtttaaccacctcggcccaccagttggccagcacatcatagcgcgcggcatcgcgggcaaacggccagtagatctgcggcgcgatgtagtcgagcagtccctgctgcacccagctgcgggtatcggcataggattcatcataggcggccgcgccccgggtatccgaccccgccggatcgtgcgagcggttgcgccacaccccggccgggctcacgccaaactcgacgttcggattgagctttttgatggtggtggaaacctgggctatgagctgctgggtgttatgccgccgccagtcgcccttcgaggcatagccctgcccgtaacggcggaaagtctcgttgtcgttaagcggggaagaggcggtttcggtatagaaatagtcgtcgaactgcacgccgtcaatcgggtagttctgcaccacttcagcgacgatgctggtgatccagtcacgcgcttcgggaatgcccggatcgagaacaaagcgatcgctggcggtgcggatccagttacggtgcaggacgaacacgctggccggtacctgagtaagggtgttgttcagctcggcaatcgtcgacggtttggtgttgaccgagacgcggtaggggttaaaccacgcgtgaaccttcatgccgcgcttgtgcgcttcatccagcataaactgcagcggatcgtagccagggtattcgccgattttgccggtcagcatatcggaccacggcagaatatccgaccgccagagcgccgtaccgtccggtttcacctggaaaaagacggtattgatccccaggcgctgcaggttatcgagtttagcgatcagcgccagcttctgctgcgtgatgcggctctgcggcgtgctggcgataatcgacccgaccggcggccagtcaaggcgcgaaacggtggtgagccacacgccgcgcaccggctcccggtgcgcctgcccggctttgacggcggcagcgttcggcggcgtgacaagggatttaggggctttactggtgcagctgaacagcatgccagcggcgatgagcgccgcgcctgccagcgccactttgctggctaaggggaatcgacgagaatggctgatgatgaactcccgtgtactcagatcgtcgcgtgtaggcgctattctcttacgattcgccggtcagagcaattccttcatccgcttcatccgtcggttcgccatcgcctagtcataatgcaaggtataggtcgcgacggccgacacctgaccggcggtgatccgggaacgtgtctggtagtagcgggcagtgagcggcagggtaaaccggcccgcgctcgcgctgcccagcgtcatctcatgattcagtacgaccggctgacgatggtaaagcaactgcacgccaataccctgcgcccgatcgtcggtggcgtcattgcgcagaacgccatgcccccgggcggagaggggctccgcgccgtcaactcgcagggaaatagtgaccgcgctgttgcaatccagctgcagcgcgaaaggggtgtcgccggtggttttgccgacgccgccgaagtggtcaagcatcgccgcagggagcttaatcagggctggcgtggcgtcattcactgaacatcccgcggtgctgatcctgccggttaagtctaacgcggccagcggggtatgctccgccattaaaaagcgctcgctgtgatactcaagctcgcccggcgtcgccgcgggaccggttttaatgagctcaatcgtcaggcggaaatagcccagtttccacaccgcatcgggcaaggcggcgggattgtccacccgttggctaaacggcgagggcgtcggccggtcaggaaagccgccatagccgccgatagcgcgcagcgatacgcgaacgccaatgccggcgaggttagtttgataaaccgtcggtcgcgtcactcccccggacagcagactgtccagcaacagcggtgacagcccgtgcggatcgtccgcgcagcggatccactgttcgccgccgtcgctaaggcggttccaggcgaaacttttatgatacagcggggtgccgggtctggcgtcagccggaaccgtgagctgccccacgttcagccgaagggtggaggcctggccgcggacaaacactggcgtacaggcccatccgctggcggccggtaacagagtgaataacagcgtcagggcgacccgacgcaggagagttaaaaaggacatgataacgtctgctgtaagatgagtggatggggggtctgcgccagcgtcggggtgagatcgtagcgggcgctacagcgctgctgagggcctggcccccattgcgcatacagggtgccttttggcgccaggccggccaggtacacctgaccctcgctggcaacgatgctgttggtgtctttgacgcgtacttcgctgccaaagggcagcggttgtcctcgcgactgcagcgtaaacagcgccttatagccaacgtgggtgtgaaagcgcgccagaaccaccgcgtctttggtagggaccagcgtcacggtgctgttggccagatccacattctccggcagcgaatggctatcgagagagacgtcgttgcggtgataggcggtggcgaagggcagcacggcgtacccgtcaccattggtggcgatggttttctggttggcgagggtcacacccccggcgccaccggcgtcaatcaggacgacagcgccattcatttccggcgtaaagactaccccgtggcggtgaatcagaatgcccccgctggcgccgtagttcagacgagcggcctgcgaatcgtggctgtagccgagattcagatcgccccttccactgctgtacccggccgtcaggctgccgctggacccgttttgccgatcgcgggtttggctgacggcgtagctaagcgcgtgattgtccagcaatgtgccgttgaggctgaccatctgactgccaacgctgtggcgggaggaggtcagggtatagccggcatagctccccggcagcaggtggctcaacggcacggaaagtgacaacgtcaccactttgtcggaatgcggctcgtcatcctcctcgtcaccgtggctgctgcgggagtcgctgtagctgagcgaccacgcgataccgtgaacctggctgctgatccccatattggcggtacgctgtgaggcgccccctgaccagtagctgtcctggtcgaggctcagatagagggtgatatcgtacggcaggctctggctggcggtgatttgcagggtcgtttttttgttgtcgttatcccgcgagtcggcgtcgggatccgggctggaatacgcctcgctcagcgtggcatagcgctgatgcgaataacgccagccggtgaaagtgaactgcgtgccaagacgatcaaaacctttgctgtactggagctgccaggcccggccatcgatcggatcctgctggtgccggtcgcgggcgtttaacagctgcagcgagagcgccccggcttctcccaacccctgtcctgcgccgagcgagaggttatggtattgcgccgcgctctgcagtccgccaaacagcgtcaggttatgggcgaacccgcgcatcagcgacagctgcatcatcaacggccgctggctggcatcgtcgctatggtagcgcccggcgaccaggttgtatttcaggctgccttcgcgctgcatgctggtcaccgaagcatacggctgggtgaagcggcggatttcgccatccgactctttgacggcaacctcaagattgccgctgctggcggtgggataaagatcgtcaatcacgaacgcgccgggggtgacgtaggtttgatacagcacgtagccattttgccgaaccgtgacctgggcgttggttctggcaatcccgcggatggtcggggcaaaacctttctgcgagtccgggagcattgcatcgctggaggcgagggatattccctgaaactgtaccgcgtcaaacacatcgcccgacgtgaaggtatccccgagggtcagttcactctgccagcgcgtcaggtcgcgctcaagccaggcgccgctggtcgtccactggggcttatcatcgctgttggcggtcaggctattgctggcgcgcaggcgccaggcgccgacgttcacgccgcttttcaacatcagatagttatcgcgctcggtgctgccctcgcgggtacgctggctggcgcctgaataacgatagttactctgaaaggcgctaataccttcgtcccacagcgcagagggaacattatccctcgcccggtgcgtcatcagcgcctgaggaatggtcattaccagccgctgatgagcaaaatcgaaattgaccgtgctgcccggcagcagtgcgttgagttcgggacatgagcgggacgttgcgccgggcgcctgggacagcacggccgggttaactccggcctgcagcagatcttccggcttaaggcagggcgtgagctgtccgcgatcgttctggcgaaacgtgacggtcttacgggcgtccagcgtgacgccgttgacctgccagctcaccggataggcgcctggcggctggcccgcctgctgattgaagcgttgcagatccactgccggcaaatggtcgtttttctccagcagatccatattaaaggtcgcctgggcgtgcaagagcgcgctctgtccgcccagcaggatggagaggctgacgacggtaacggtatgagccgggccgtggcgcatcgcgacatcagacgcttagtgcgccgaaacgggggcgctaaacgtctgcacagcgccaaagtcatccagaatgcgccagctcacctcgcgggcgcaggcctcgccggggagggaatactcttcacggctgtgaggagcaatcacgctgcgctcaagcggcgttttctggttctggcccgcgcagctgagcgtggtgatagtcacataatagggggaggcattctccgcctgcaggtggttgccgctgacccgccagcgcaggtgctgcgccgcgtcgagcgccgagccagggagccctgccgggcgataaatgagcttcagttgattctttatagcaaattgcagaatgttctcgccagccggcgcggtattggcgggaatcactttgatattcagggtgaataaactctcacggtcagagggcagttgcggcgaggttaataacacgcgcagatcgttgctgtctccggcatccagacggaacaatggcggggtgacgataaacggtgatttattattatcagccagatcgtctacccagctctgaataagcaccggatcgtgaggattggtgttttttaccgtgatgtctgcctcatggctttgttcattataaatgacacgagtgccggcaatggcaaccccggcggcagacgccaggaacgggcaaaagagaaggctcaggataaaagccgctttataacactgcataattgaggatccggtcacgaggaatgagaataagggcagggggacgctgcccttggaaaagtggcaatcaggacattctattcgtacacaatatcaatattggccgtggcattaatattgccggcggtgacatcctgtgaggaatcgctcttcagatcggcaataaagttaaatgcaatatcaccgttttcgtcggcttgcgaaaccgccgttttgctctgcttgtcaaaggtcagctgagtgccttccgttgagccgtcaggggaagagaagacttcaatgcccacccctttggcggtatccgcggcgtcagagagcgccagcacggcggcgctggtgccgttagcgttggtgtccggagtaccttccaggctgatactgatgttctgcgccagtgggcagccggtgaggttgatggtgaacggcgtttctgcggttttcgcttcatgggatttcagcgccgacatatcgacgttgccaaaatcgacattaacatcgccaccgttattggcgatctggcaggactcgttaataattttaccggtgaaattcagtgtacccgccgcgcgggcggtggtcacagtagccagacttaaggccagcagtgaaccaacaaccagcagggtgcctttttctttcatactcaaaccttattaaataatcacaagttaacaaaagcgtttaacatttttaaagcatgttttttatttctgttcacaaaaaaacggtaagcatcgctaatgtatattaccgtcgggggcgggattatacggagaacatcgtaaaggcccattgataagatgtgttaagctgtaacattatttattttttggtgtaagtataatctcattaaatattaaaaaagagtcccatacgtataatgcattatttccgggagataactgttctgagcaaattttacgaaaaagttgctgttattcccggcagttgaccgggtggcccggaataatcatttacgctgccgctattttgcagtagcgtggagtgacggcaggaagccgcaggttgtagggcacagaaacgatgctgtgccgcgcagtgtcacccgttatcaaggaagattgctatgtctccattccgtctcgctctgctatgtctgtgcctggcgccgctggcgtcgtctgctgcgctttccggcgaggttcatttttcaggacgggtcatcaatccggcctgtgttatcgccccccggcacgatcgtatcgatgtctcgtgccagcaccattcaccggaacaggtcgccttgacaaacaaccgtcctcgctacgccatgccggacaatcgtggtgaggtcagtattcactggcgaaatgcgcagcatagcgaagcggatgtcattattcgctatcgctaaggcgggataaaggcaatgaagagtaagctgatgcaaggaggtaaaggataaacccttgtgcggtttacgcgcgcatcagccataaccagcgggcagacgcgcgcgcagaaaatcattcatgaaaacaattattgccgccgcccggcggcagaatcaggtgtcgtctggcgcccaagcgagctccgggatcggaaagcggcccaccgtcatagagaaagggaagcaactcagcggatccgcgactgttcatcgtcgcgtaacgtcagcacctcaaaaccgttggcggtaacggccacggtgtgctcccattgcgcggagagttttttatcgcgggtaaccaccgtccagccatcttttttggttttgatacggctgtcgccctggttgaccatcggttcaatggtgaacaccatcccttcctgcagcacggcgccttctccggggcggccgtaatgcagcacctgcggttcctcatgcatttcccgaccgacgccgtgaccgcaatattctctgaccacgctatagccatgttcctccacccagcgctgaatagcgtggccaatatcgcccagcgtcgcgccaggcttcaccacctcaatgcctttccacatcccttcataggtagtctttaccagccggcgggccagcggggagacatcgcctatcaggtacatcttactggagtcggcaatcatgcccgctttctcgagggtgatatcgacgttaacaatcatcccggagcgcagatgttcggtcgctttggggatcccgtggcacaccacatcgttaatggaagtgttcaacacatagggaaaatcgtattgccccttgctggccgggcgggcgtgcagctggttgacgataaaatcttccactcgatcgttaatcgccatcgtcgttacgccgggaacgataaaagtatccagcatatcaaacactgacgccagcagctggccggcatggcgctgccgggcgagttcgtcggcggttttaatgattattgatggcattgatcacctccagcagacggtcagagccggatttcagcatcagcagtttgatctgctggtggttaagctcagggtagagttcgctcatcatgcccagacggatccagtattccgcctgggcattgacggagcgggacatggctttgctggcatcacgaatatcatcgtgcagcagatcggagattttgacgattcccatagatatataccgtaatgattcgtatatacatcgtatacaatccagcgcgggatgtccttggcattttgtggcgtagatggcgagcaccatgcaaaaaagcccgaccagcgggcttatattcagcattttttcgggttaaaaattcgcgctgtgcaccattgcgaaaattacccattagattatcggtatgcagaaagaaaataacatgatggcgacgcatcaatatattttatgcaggtgttaattttgcgtattaatattctcccgtcaggccgggaatccgaaggatttacagcgcgtcagtgagtttatccaccaccactttacccgcattatcgaactgcgtaatgcggaaactgtcgctccaggagcggcgggtggtgaagcggtcgaacagggatacccggcctttgcgctggccatctttacttaaaataacccattcggtcaccgaagaataatgctggctattgtcatgccgactctgttgttcaacaagctggtcttctttttccacttttaaataatcacgcaacatatttaacctccatagaaagtattattaacattactccttttatttattctttcaatcaaactttttaatcaataaaagtaactattagtgggcgacctaagtgcaaaaatcgcggggaatatcactccttcggacggcctggtccactacgcttaacgagagcgtccgccgcgcctactgcggtgtccgggtcagaaagaggccaacaaaaggctatctccttgtattcttaataggcgtaattctgctatatctaatgcgttttgccacgaccgagccacagagagcgctgtaccatgagtaacgatcacctgacggatattgcctatcgccactttattgaaagcgttaaagattatgccatctatatgctgagcgccgacggcacggtcattagctggaatgagggcgcccgccgggcaaaagggtacctgagcgacgagatcatcggtcgctacttcggtctcttctatagcgaagctgagcaactctccggtgtacccgcaaaaaacctggaaatcgccctgcgtagcgggcagtttgaaggggaaggctggcggtatcgcaaagacgggtcccgattctgggcgcatgtcatgatagatactatccgcgatgagcagaacaccctgctgggttttgccaaaattacccgcgacattagtgaacagaaggcgattaacgaccgcatcgcctggatggcgcgctacgatgcgttaaccggtttacccaatcgggtggagttttttgaacgggtggagaagctgatcactggaaatgatgcccgccgctttgccattttcacgatcgatttagacaaatttaaagagattaacgatctgcagggccatctgattggtgaccagctgctgcagcgcgtggcgggcgccgtgctcaaaacgctgcagaaggaggagatggtcgcccgcttcggcggcgatgagtttgtggccgttaaacctttttcagatgagggtgaagtggatgcctttgctgcgcgcctgtggcactgcttcagcggtaagcagacgtttgctgcgacggaagtggtgctctccgccagcattggcatctcagtctacccggaggacggcacggatattaatacgatactgagcaattccgatctggctatgtatcgggcaaaaagcagcctcgaccataagatttgctggtatgaacgtgaaatggatgacaagacgcggcagcgcaatatgatggccgccgatatccggcgcggtattcacgccggggagttttcgctccactatcaggctatccgcaacatcaaagatcgtagcatcaccggttacgaggcgctgctgcgctggcagcatccgcagctggggacgatcccgccggacgtgtttattcccatcgccgaagagagcggcgctatcgtgcccttaggttactgggtgctcgagcaggtgtgtaacgaatcgctggaaaatggtttgaacagaaaagtttcggtcaatatctctccggtgcagttgcgccatcgtagctttatcgaaaaagtccgcgagatcctgatgcgtaccgcctacccggtcagtctgctggagtttgaggtcaccgaaacggcgtttgtgatcaataaacagctggcgttcagcgttctgcatcatctgcaaaaaatggggatcagtattgcgctggatgactttggcaccggttactcctccctgagcatgctgcgcgattttcatttcgacgtcatcaaactcgaccgcagctttatgacagatgtggagagcaaccctcaggtacgctcattcgtgcgagccattatttcgctgggcaattcgatcaatacgccgcttatcgccgagggggtggaaacggctggacaactgcagatcctcgaagaggagggatgtgacgagatgcagggatttctgttcggcgagccggtcgatatcaaacacctgcccgaccggcgctgatgcgcccaccctccgctggtgggcgtaagggcgttactgatgcgcaagcgctgcctgcccggaaagatgcagcagcgccgagcgcagcgagacctcgaacatctgaccgtgcgtcaggccggggtagcgccagaaggctacggtcaaccctttactggccagctgctgttgggtttgacgcaacacctcaagcgaggcctcgtgcccggacggctctccacgggcttttccatcaccctcgagtaggtacagcgatttcccgcgaaagcggacggcatcaagactttggcttgcctgcaaaggcgattgcagggcctgacctagcgacgggctggcggaatagtagatcccgaacggcgaagccttcctccacgcgtcgagcacaaacaatccgccgtaggagtggccccagatagcgcgctgatggggatctattttcaggttagcttccgtctggggaaccatcgtttcggtcagcagctggcgaaaagcatcattgccgccggttttacgcggcggtagcgcgggtttcccggcgcgaggctcatgcgtctttagcggtggggtgtaatcccaggcgcgggctgcggtatcaaagggcagcgcggtctggtagccgatagcgacgatcaccggcggggagccggcgaagagctgctgcagaaacgcgtcgtcgagtttatccatcaccgcgttgccatccaacatatacagtaccggatagccggcggcgggcggggctttgtccggcactgcggtccatacccggtagtgacgttcgccatcggcagagtcatactggcgttgcgtaaagtggtaaaacgccgaccctttatccgcaatgttcggccccagcggctgaagatccggccgggcaatactgccgctgctgtagaagagtgcgccaatcgccagcgtcagcagcccgctcgtacgacctgttgtgatgctccctgaactcaacttcacctcgtctgtccccctgttttgttgcttctggcgttattgttgggctgacacgttagcacagcttttatgataatggttctcatttctttttctggcgttgccacaaactgtatgctgggggagcgggtgacgggataaacggagatgacgaagagaaggccccctgtaggcggtcataaaagaaaattcaggaacgatcgtgaaggtgactcaacagttttttgaccagcggagtgagcgcaataaacagcagcgcaataattacgatcagcaagagcgtcagccctttatggtggctgataagcaccaacagcatcgccagcgtcatggtatgatcctttaataaatggcgttaaccaccgccaaggtgaataaaattcaacagaatggtcatgaccacccaggccagcagcagatagcgtcgtttatcgcgtcgagcttccagcgcagcaaaatagttagcgctgtaccaggttgatatgataatagccagcgtgatgatgacctgccagatcgcctcgctgaaaccggtgacgatgcttatgccacgaaagcagaggacaatcgcaataccgttaaacgcattacacatcagccatccccacagacttgcgggtcggctaaataaatatcccaatcgtaaaaccaatgtcgtattcaccctgctaaaataatcgcgctgtaaaatgcattttaacgatcgaacaggtattgatataaatcaaaactaatggaataccgcaggaatcactggcgtacggtgctaacagcgcgagcaataaacctgagggttagtagctctgaagaatatttaactcattgttttaatgggattttagttatgaaatgcctgcgctaatgcgcgtacttcaagcaagtagcaatacgttggtttctctggttattattgccattgaggttataacggggagaatcagattattcgccatgtttgctgggcgaggggtgaaaatccgaccggggccagagctccggtcggtgtcatacttaatggggcaaggcgttatgctgcagaattttcaggaaatcatgtttgtcagagattaatgacagtgcattagcgatcagctcatcgctaaatatcgaggcaatttccttgagtacgtcaatatgctctttctctttcgcgatcacgccgatggcaataaacattacattgctccgatcccagattacgccatcaggaaactgatagatctcaatcccggttttaaggatgatatccgtcgcggatttcggcaaatgcggcagggtgatgccattgcctaaaaaggtcgagacctgatgttcacgctccagcagaaagtggacacattcctgattgacatagcctttggctttaaactccgcgccgatcatggcgatgacttccgctttattactggctttgcagccaatatgcagattatccagcgtgatgttatcgatcataaccaacctccctggtgagacgagtggattttttatcttcatggtttgctgacagctctgcttctaactgctcaagcgatttattggaggtctcgggcagggcaaagaccacgaaaagaatggctaaatagttaatggcggcgaagataaagaagaccggcccaaggcccagttttgcctgcagcagcgggaacagatagctgaccaccgcgttcatgatccacatgaaaaataccgagatccccatcgacagtccgcggaatttcagcgggaacagttcggctaataccacccaggtaataaagcccatggagccctgcatcacgccgacgaacagcgcgcccagcagccagatggcggtagctttcaggtcacccaccagggtgtaatcgacagcggcgataatcagatgcagggttgccataatggcgaaaccgtagatgatgattgtcttacgtttgaagcggtcgacaaggaacagtaccccgatcagcataccgcccacggagaaaacaccgttcagcacgttgcagatcagcgaagtacgctctgagaaaccggcggcactcaggatttccgtaccgtaatacataatgacgttaacgccggtggtttgctgcagtgcggcccaggtaatgccgaccagcaaaattttgaggatccagggtgttttgacaatcgtcgcaaaggtgctctgggcgctgtacttattaccagcttcaattttgatcagggtagagatgtcatcgtactccttctgcgcgcgttccgccgggcggatttgtttgaggatatgcagcgcttcatcatgacgatttttgctgatcagccagcgcgggctttccggcgcgcgccacatgccaacgaacaggcagatggccggaatcgcttgtaccagcagcatatagcgccagacgtccggcagatggccccagatgatgccaatgatcgcgttgatggcaaacgccgccagctggccaatgacgatggcgacttcattcaggccggtcagcttgccgcgcatctcggtaggcgccacttctgaaataaaagtgggggcggtgaccgaagcgccgccgacggcatagcccagcagggcgcgggcaatcagcagggtagtgatatcgggggccgcggcggaaagcaacgcgccgatgagaaaaacaaaggagagaaagagtaaatatttacgccggccgaagtaatcggcaaatttgccgccaaacacgctgcccagcgcggcgccgaccagcagaacgctcattaccagcccttcggtggttggggtcagcgccatgtactgcttcagtgaggaaaaggcgccgttgataacgccggtgtcgtaaccgaaaagcaggccgccgaaggtggccactaaggtgatctgatgaagtcgttttctctgttgctggttcaggtttgttataaatgacatggtagtccctttattttgttgaacgacacaagataaaaatacatctccccagtcaggatttatcacgcctgtgttgtcgtatctaactgaattaaatgattttcttctttgtgtaattgctcagcacaaggcagggtacgctaagcaatggcggtcaaagaggtttacggcttggtgttgacatggatgtagtcgatatccgttctcctttgcgggttagcggtctttagtgcgtcagtcgcgacgacatttgccgatgaacagcgctctggtgtggcacgttgctgtcgctccggcgatttaccgtggtaagaatatggcacaaagaaatggaatgaacatgcaacaagatcacattatgaaaatttaatttcaaatcagtgttgcagaatggtaaatgcatgaagccaatcacaaaggctaaagggagtatatccccatgaaaagcaggttaaatttacagtgaggtaataacgatgttgttttcagtgggttaatgtaaatcgaagaatactacgcagatcacatttttacgccataatattgaagaatagaatttatatttcattgtcacgatcggggcaaaatgaagatagaggccttttacctccggtctgaagggggaaatgagcggttcgctttgcccacgggggaggaggttaaggatgaatgcatcaccgggggaaacaccgggtaaaaatgcagagaaggtggattctctgcatcttacccatcacgaaaaagatcagtgcagtgcgggccagtagccttcgttggcgacgatcagttcatcgaggatggctttcgccaccgaagcgctgggcaccgttttcgacagggcgatggcctgccacagtttctggtaactgccctcaatccaggcgtcaaccaccagtttctcaactgccacctgctgctccatcaaccctttctggaatgacgggattttccccatcgccagcggttccggaccattaacgcccaccaggcaggggacttccaccatcgccgtctcatcgaagttggcgatggctccgttgttctcgacgatcaacagcatccgctcctgggtgttaaaggcgatggcgcaggcgaggtcgacgataaaggtggcatgggccccggcatggaaatgcgcgccttccgccgtgccgcgacgggtgatctcccgggccatatcaaagacctctttttcgcgtccggccatcacctcgttggcccgcgtaaactccgggtcggaatgcgccacttcatagtccgggtagagatagtatttcagataggtgttaggcagcgtcgacggatcgagggcaaacacatccttcacctttttaaaggtctcgatccaactcggcgccttatgctgaaagtcttcttttgggctgctgtatccctgctccgccacgtgacgcttcagcgccggcatcaaatcgttaccggctttatcggtgatgctggtccaccagccgaagtggttcaggccatagtaacgaacgttcagcgctttgcgcgacggcaggccgaggatgtcggcgaacagaccctcgatagccaccggcatatcgcagatgttgatgatgcgcgcgtcgggccgcaggcgacgggtcgcttccgcgacgatagccgccgggttggagtagttgagcatccaggcccctggagcgtactgctgcatataatcgaccagctccagcaccccggcaatcgagcgcataccgtaggcaatcccacccggaccacaggtctcctggcccggcacgccatatttcagcgggatcttttcatccttttcccgcatctcatacaggccaacgcgaatatgcgccatcacgaaatcgacgtcggtaaaggccgcctgcggatcggtggtatagctgaacttcacctgtgggaagcgttcagccaccaggatggcgcaggcgtcgccgatagtcttctgacgctggtgatggttgtcatacagacggatctcccgcaggggaaagcgcgacatattttccagtaacatcatcacaatcccaggggtataagtactgccgccgccggcaatggtgaccacaaaattatctttcatttaccacctcgttattcaataacacccagactggcgttgaccgccgttcgaattttgttaactcccaggccatagataacctggacatggtttcctttaatcagcacgctgctcccgccgctctctttcaacagcgtctgctggataagggcggggtcccgcacatcaacccgcagacgggtaaaacagttgcccaccgcacagacattctctttccctcccagcccggcaatcaccagcgcgcctttatccggatgctcgctattagcctgttgcgaatgctcatcttcggctgcggtttcgcggcccggggtgagcagccgcagacgggtaatacagaaggtgccgaccaggtacatggtcgcggtttccagcagaccgagggcgacaaacaccggccagcgcgtcgcgctgactcccgccgggaggttatagacgacgaaatcgatgaggccgttagtggcgcagaccctgacgtgaagcagccaggccagcatctggaaaaaaccgtccagcagggagtagataagccacagcaatggggcggtgaagataaagagaaactcaaaaggttcggtgatccccaccaggacggaggtaacaatcaaggggatcagcgtgactttcaaccgctgcttattctccgctttcgccgtacggtagaaggcgagcgccatgccggcggtgccaaaaatcttcaccatcccataggtgaggaaacgggcggaatcactgagcgcgtcaacggggtggcgggcgatttcggccaggaaaataggcttagcgccaatgacggtctgaccatcgatcagcagctgaccgccgatagaggtaaaaacgaacggcgaccagatcagatgatgcagcccggtggggatcaggaaccggttgagaaagccgtacaggaagaccccgatggcgccaaaggatttcataaagccggtcagcgccgagatgcccagctccactaccggccagagatagacggtggcgatggcgaacatgccaaccagcggcagcatcacgatcagcaccagcttactgttgccgtagatcgacagcgcgccgcgaaactcaatcccaaccacgcgattatggacaaaggcgacagcgcagccaaggataatcccaaggaatacgcccatatcgataacctgaaaaccgaagataaaggtttgtccgctgccgtacagttgcgcgttggtggctccggtcgccaggcgatgggtgagggttagccagctattattcgccgccaggtacatcagccaggtcatggccgccacgaaggccgcttcggccttgcgggttttcgccagaccgctggccagcccaaggcagaacagaaacccaagatggttcatcagcgcccagagcatactggagacaaatttccccaccaggtagagcccgctgctttcatccacccacagccggttggtcgtcatgctgaacagggcgatcaacaggccgatagctggcagatacagcaccggcccgatcatcgccttggaaaagtcctgaagctttttcactccaatcatggttgtcctctcgtctttgcagaccgctgtcatcacctgatgaataggcttatcagactaggagcagaccaccgggaacccgagcaggaaaagggccatctgtgacgaaagtcatatatattgttgctggacagatatataaatatggcgtgatttatagatgtgtcattgttgattttttcgctgcaagataaaaataatcatctaattacatgaagttattcatggttaccgttgactggcgccactccatcgagacatctaaaagtgatttataaaaagattgccactgaactgcggacccgcatcaacagcgacgactatgccgtcggcgatatgctgcccagcgaaaaagcgctcgccgcggagctgaaggtctcggtgatgacgctgcgcaaagcgctggcgctactggaggaagaaaagctgatcgcgcggcggcacggcagcggaacctgcattgtgcgtaaaagtaactatcatggcggggaactggagggctttaactaccagatgcaggtggtgggcgtcaccaactaccgtaacaaagttattgaatttacgctgcttgatgccccgccagccattgcccagcagttaaagatccagccgggggagaaagtttattacgtcagacggctgcggctgatcgatgaggtcccaatcctggtggaaaacagctatatcccattcgccaccttcccctggctcagcgtgggtaacctcgagcagtctaagttcaactatttcaaaaaagagtgccatatcaccatcatcgagagccaccgcagctataccccggtgctggcgacccgtgagcaggcggagctgctgcaggtggcgccaaacagcctcctgctgcgggtgcagtcgatcagctacgcccagaaccgggcgatcgtcgatttctcagagatctaccagaacaccagtaagtacaatgtgaagcacattacccgccgctagaggattcagaccagccatccccgggcgatcagctctatccccagcgccagcaggaacaacagaaagccctgacgaaagcgctgcgggctgagacgcgagcggatccgctgtcccagccacatgccgagcgacgccggcaacagcgccagcgccgacaatagccatgcatcatcatgccagccatcgtgcagggcgaggccagccgccaacgccagagtggaaagggtgaacgacaaccccagggcctgcaccagctcgtcgcgacgaaagcccagcgcctgtagccagggaacggccggaataacaaataccccggtcgccccggtgataacgccggtcagcccgcccatgagcggcgacagccacttctccacgcggccggaaacctgaaacaccggactgcagagcgcatacccggcatagactatcaatgcggcgccaagcgccagcgccgaccaccgaggattgaggccgatcagcagtgaggatccggccaacgtgccaataataatcccggtcatcataagccagagacggcgtacaatctgcgccagcgccgggcctgccagtaactgccagagattggtgagcagcgagggaagcaccagcagcgccgctgcggcctgcggcggcatcagcaggccaagcaggcccatcgccacggtgggcaatcccatgccggtcacccctttgaccagcccggcggcaataaagatcaacaggaaagagatcgtgtgtaaatcgaacattatggctcacttttcagggtagaaaggggcattgaaacagctggtcgtgagggccacaatgcggtatgttggccatagactacggaaaaaccgaagggaaaggagggcctgatgcgactggatctggccgatctgcggctatttatcgccatcgtggataccggcagtatcaccggcggagcggcgaatgcccatctggccctggcgtccgccagtgagaggctgcgcaagatggaggccgagatcggcgtgccgctgttgcaccgtcatgcccgcggggtgacgatgacagaggccggggaggtactggcgcgccatgcccgcccgcttcttgcgcagcagcagcgtctgcgccaggcgatgcacgccttcgcctgcggtcagcgggggacgctgcgcctgttcgccaacacctcggcgatgtcggcctttctgccggggaagctcgccgcctggatggcagcgcacccggcggtgcagatcgaaaccgaagaacgcaccagcgcggatatcgtcagctgtatcctggcgggcgtggcgcaggccggagtggtgtccgatgcggtcgaccccgggccgctgcgcctcgatcccgtcgctgacgacccgctggtgctgatcgtgccgccagctcgccctctggccgaaaaagaggaagtggcgtttgcggcggtgctcaacgagccgttggtcgccctctatcagaccagtgcgctacagcagcatatcgaacagcacgcagctgaactcggccaggcgctaaacgttcgggtcaggatgagccattttgcagggctttgcgagatggtggcgcacggcgccggcggggcgatcctgccgcgcgttattgccgagcgttaccggcagcgctattcgtttgccgtcatcgggttacaggaccgctgggcgcagcgccgtttgtgcctgtgctatcaggatgacgccagcctgtcgccagcgatgcgccgcttactggaatggcttcgtcagccttgagaacatcagtgacagtgtcacttttcatgcccgttattgctactgacatccgtgccagagatgcgatagtagaggtccgcttttattaagacgcgaatcaggacagacaagatgagtacattaccaaaggtcgcggtgctaggactcggcgccatgggacacgcttttgccagtaacctgctgaaaaacggctttaccgttgccggctggaaccgttcgccagcccgcggcgaagatttacaggcgcatgggttatctctgcacgccacgccgcagcaggcggtggccgatgccgaggtgatcatcagtatgctcgccgacggtgaggccaccctcgaggtactggcgcaaatcgcgcccgcctgtcagccgcaggcgatctattgccagatgggcaccattggcctgccggagacccggcaggccatcgctatgttgcgggaacttcagccagcgatgacctatatcgatgccccggtgtcggggaccaaagcccccgcggagaaggcacagatcctggtgctcgccagcggagatagggaaaagggcgccgctgccgaaccggtgtttgcggctatctcccgcgggacgcagtggtttggcgaggcgggcaacagccagaaaatgaagctggtcctcaatgcctggctgatttcgatgatgcagggcatcgcggagagcgcccagctggcgaagacgctgggcttcacccccgaccagctgtggagcgccctggaaggcggcccgctggcggcgccctatgtcaaagtgaaactggacgccatcgccagcgagcagtataccccgcagatgcagctggcgcatgccctgaaagatgcccggctggcgctttccctggccgagccgcacaccatgccggggctggaaaacatcgccgaactgtggcagcaggcggcggacgcgggatatgccggagaggatttgtctgcggtatatcagtggctgtcgccgtcgtcaaaagcgtagtttcctacccacgcctggaaagaagtggccatggtggccacttatcctggcggatggggcatcaattcgaatctaccgtacgttagcttaagctatcaatccattcgctctggcgtggattcagccggcgataacagtgtaccgacaccgccagctgcgtcaggtcggtgaagaccatcggatcgagctgtatatgctttttaatttgctgcagccgataggtgagcgtattacgatgaatccccaacagcagcgacgttttgcccggttcggcattattggcaataaagctgctcagggtatccagcagcacttcgccggaatcatgctcaagcagctggcgtacgttattgataaaaaaattgaccatatagctgtcttccagcaccctgaacaggcagagcattgccatttcgcgaaagtagtagatctgccgctgcggctgcactttgctacccacttcgatcaccgagcgggcgaaccgaatggcctcgcgaatgtccggggcgctgtccgcctgcacgccaatcccgatatggtaatggcttatctgattactcagtacaaactcaatgccccgcagcagggtttcctgggcttcgcttagcgcgttgaggatcaatatttcatggctgcccagcaaaataacgtcacttacgccggagagctgcgagaattcccgcaacagcgtactcagtatgtcgcttaactgatgctgttcgacctgcacggtcactacgatcggaacccgcggtgtatcaaaatcgaaaccaagttccagcaggcgatgaagcgcttcttgcccggcgggcgtagccccttgttcaagatactgacaaaacaaggtgtcacgcagacgttgccgccagttggtttcccgcatctctatggcctggcggaccagcagttcggcggtgagcaccgccagttcagcatagcggcttatcgccgcgggatcgccgctgatgcctaccaccatcaccacgcgatcgtcatagataatgggatgattaataccaggatgcacgttgtgaaaacgcgcggcttccgcggcgttgttaatacaaatgcgtttcccggtgcgtattacctcccgggcgacttcatgctgttcgccgatacgatgccgttcacctgaggcaatgatctgtccatgatggtcaatcacattcacgttatgatgaattatcgccattgcccgggcgacaatttcattagccagcgctgttgtaataatcatacagttatccgcttatgtgcctctccgcgccacccgctcagaaaggttcgtagaacattctccgcggcgtcggcgaggagcggttcgcatgtgttcatcgactctgccagcgccatagggcgctggcaaatagaccacattgcgtcaatatggtgttgatataattgccggctgctctcatcacgcccgccgcaaagggccacaaccggcacgccatggcgtgcggctttgcctgccacgcccaccggggccttaccaaacgcgctctgccgatcgagccagccttcacccacgatcgtcagcgcggcatcgcgaagatggtcgtcggcgttaagcagctccagcaccaggtcaatgcccggacgcagcgtggcgccggtataggcgataagcgcagcccccataccgcccgcggccccggcgccgggccgtccgctgacgtcgaatccgagggtttgcgtaagcagctggctataatgcgccattcccgcctccagttcgcagagcgccgcctcgtccgcgcctttctgcgccccatacacccaggtggcgccatgctcgccaagcagagggttagtgacatcgcaggaggcctgtatttcgctttgctgtagacgcgggtccaggccgctcaaatcgatgcgctgaatatgcgccaggtcctgacctgccgcgggagccggcagcagggtgccgtccttacgccagaatcgtgcgccgagcgcctgggcaaaaccgatgccgccatcgttggtcgcgctgccgcccaggccgataatcaagtgccgacacccggcgtccagcgccgcctttacctgttcgcccagcccgtagctgctggcctgacgcacatcccgctgcgctggcggcgtgagttcgagcccacagctttgcgccatctcgataatggcccgctcgccgggcaggatcaggaaatccgcctgcagggagaggccataaggcgaggtacagcgctgctgttgccacaccgccccctcaagcaacggactatccgccagagtcgacagcagtccctctccgccgtcggacacgggcatttcgaccagctccagcgtctggtcaacccggcgcaatccctgggctaccgctgcgcaagcggcctgcgcgctacagctacctttaaacgaatccagcgcgataacaatcttcatacgttctcctgcgttaatgcgctttgcgcggcgttttatcggtggtcatgagctgtaataacatccccagcagcgcacatcccgccatggtaaagaaggcgtagatataacccgctggattttcccagccgccgccaaactgaatgagccagcccataagcaatggcgaaatgccgccgccgataaacatcgccgtggtgatgattccgttagcggtcgaggtggcgcgttcttcggcggagtccgacgccatggcgtagtagataggccacacggcgttggccaccaggccaaaaaatagctgaatggcgataaggcgcggcatattggtggcgaaatagaacagcgcaatgccgatactcatccacagaccgcagacgatcagggttcgtttacggccaaagctatccgacagccagggccagattacctgacccagggtaccggtaagcgtgaagataatactcagcccggcggacgccgccagcgacaggccggagacgtgataaagatacgggggcagtacaacgttaatgcccatatagacgatttgcgtcagcagggtattgcccgccgtcagcgaaatattgcggttgcgcagggtgcgtaaaaaggtcttcatcccttcgcctttggcgacatggctgctttcctgcgtcgccgggcgcgtcaacccctggttgtcgatatgctgataaagcgtgttgatgcggtcggcggtagaatattttgcccagaagatcattagcgggatggcgacgagcagcgccagcaggaagcagtagcgccagctgccttcgccaaacgtggcaagcaccaggcttgccaccacgccgctcagcagcgcgccaatcggatagccggtatgatgcacccccagcgcaaaaccgcgcttctctttcggccaccactccgcggtgttgctgacgccgacgggttcgccccagccggccccaaggttgacgcccacgcgcagcagcacaaaggccgtcagcccgtggctgatagcttttatcccggaaataaaagacagcgcggtatagcccagcaccagcggtacctgaaagcgcgctcgtttccagccagacccgtagcgatcgctccagatggagccgggaatatccagcaccgcaagggctaccatgatcagggcgacgatattgccccactgttccggcgagagcgagaactccttagagatgaccgggccaaggcgcaggatcatctcgcgatcgtaggcgttaagcacccagattagccagcaaaccagtagcgaaacccaggagaagcgatgtatcagccgctttttgccacgttgttcgccggcaggtgtgtgattgattgttgtcatagtcgtgtttactccgcggcgtcgcgacagcatgatgcgcgccgcctggtgtcagggtcagagtcagttcgccgggtattattgttatcgcggcgagccggtggttcgtttagccggcgaagcgccgttccgctacgccggtcacgcccaggtcgtaaatggcgaacaggctgccgcgcagctgattatcttccgggaagcgcggcaggggcggctgcgccatggaggtgacgtacagcacatcaaggttttcgccgccgaacatcacgctggtcacttttttcaccggcatctcaatgatgcgatcgaccttgccctccggggtatagcgcaccagcttgcccgcgtagaccagcgcgttccacagatagccttcgctgtccacggtggcgccgtccgccgcgccgccttcgcggcgatcgacatggcaaaagacccgttcgccggaaagatcgccggtcgcggtgttgtagtcccaggcgcagatttcgcccgtccaggtatcggcaaaatagaaggtctcgccggaggggctccagcagggggcgttagagacgataatgtctttcttcagcacgtgcagtgacagatcggcgtccaggcgatatagcgcgccgctcggttcctcttcgcgcatatccattgacccgaacagaaagcgtccctgacgatcgactttgccgtcgttgagccggttaaagggtcggtccgcttccggatggtgcaacagcgtcagctcgccgctggcgaagtcgagcagatgaacgccattctgcagcgccaccaccgcgccttcaccgttctggcgcagggcgaaagagccaattttctgtcgcacgtcccagctcttgatcgcgccgccctgcgcgttgcaggcgaacaggcgcccgtcgaggctgtccacccaccaaagacgctgctgttcgacatcccagaccgggctttcgccgagtcgggtttttaaatccagtaacacttcaatgcgcataatggcctcctgattacactttttcgccgtgggcctgtttcgccgatacggagcctggggatgaggaacttttgagaaacagggacaccagcgcgccgataatcagtagcgcgacagcgaaccataagccggacgttgccgcaccggtgcggtcctcaaacgcgccgagaataaacggcccgagaaagcccccgcacagcccgaggcagttgagcaggccgaagctgcccgccagcatatgcccgctcatgatggacgggagccagttaaagatgatggattgcatagcgaagaacatgaaagcggccagcgagaagccaagcagcgccacaccgtggccggcaatggcgccaatcgccatgccggtcgccatgaccagatatccggccatcagcatgctgcgggaacgctgttccgtgcgggcgaatcgcggcagcaggatcccacccgcggcggcggcaatccacgggatggcggtcagcagaccaatctgcagcggagtaagctggccccagctaccaatgatccccggcaggaaataactcaggccgtaaaccgaaaactggtgggtaaagtaaatcagcaccagcaacaaaaacactcgggtggacagcgcggttttcagggagaaacggctcggcgtatggcgcgtttcctcggcttctttcgccagtaccgcgttaatggcttgcacatcgtcgctgtccagccagcgggcgtcggctggtttatccggcagtctgcgccagacgacgaacgccagcgctatcgcaggcagcccttcgataaagaacatccactgccagccgtgccagccggacatgccatcaaggcttaataacaatccgcccagcggcgcgccgataatattggccagacagacccccagcaggaacaggccggtggcttttgcgcgctcttcgcggccaaaccagagggtgaggtagtaaataatgcccggatagagtcccgcttcggcggcgccgagcagaaggcgcatcacgtaaaaggacgtaggcccggtgacaaacgccataccgcaggagaggatgccccaggtaatcatgatgcgagctatccagcgccgtgcgccaatccgggtgagaaacaggttactggggatctccagcactgcgtaggtgagaaaaaacaacccggccccgaggccgaatgcggttgcggaaaggccgatatccaccgacatggtcgctttcgccatgccaatattggtacgatcaataaagctgatgatgtacgccacgataagcagcggcatcaaatggcggtagatttttttatgggtgcgttgcagctgcgtcccgtttaccgccttttcatttattgcggacatggttattatttccccgtattcgtggtcagaagccttgccgggatcgagacgatcccgttcgtcagctcacaggttgtcgccgggtgctgacccgaacgacgcccggcccgaagccccacttcgggccgtcttttgctaagcgccttcgcgctcgaacagcatagaaatcccctggccgccgccgatgcacatggtgaccagaccagtgcgtgcgccgctgcgcgccatttcatacatcagtttgaccggcagaatcgcaccgctggcgcctaccgggtggccgagggcgatcgcgccgccgttgacgttaacgcgggccgggtcgagacgcagatcgttcatcaccgccagcgcctgagcggcgaaggcctcgttgagttcaattaaatcaatggactgcacatctatattgagacggtccatcaggcgtcgggtagcgggagagggaccaaaccccataatctccgctccgcagccggcgaccgcccagccgcgaatgcgcatgcgcggggttaagccgcgtttttccgcctgctggcgggtcatcatcaccagcgccgccgcgccgtcgttaatgcccgatgagttggccgccgtcaccacgccgtcggctttaaacgccggacgcagcgtggcgagcttttcacgcggggtgtcgcgcgggtgttcatcggtcgcaaacaggcgggtcgcttttttgccgtccggcacctcaagggccaggatctgctcgcgaaagcgaccctccgcgatcgccttcagcgccttctgctggctcgaccaggcgaaatcgtccatcgcttcgcgggtaataccgaagcgttgcgcgacgttttccgcggtgatgccgttgtgataagggccttccggccaggtgagaatggagatcaggccatcttccagctcgccgtggcccatgcgatagccatcgcgcgctttacgcaggtagtagggcagctgggtcatattttcagtgccgcaggcgacgaccacctcggcctggccgctttgcagctgcatcatgccgtccgccagggcctgaagtccggagccgcactggcggttaacggaataggcggtgctctcctgcgggatccccgcgcgcagctgacagatgcgggcgataaaaccgctttcggcgatttgcccgacgttgccgacgatcgtttcgtcgatatcctgcggcgcaatcccggcgcgggcgatcgcttcgcgaatgacggcggccccaaggtcatgctgatgggtatgtttaagactgccgttaaacgtgccaatagcggtacggacgccgctgacaatcacaatatcattagcctgggtcattgtttttctccttacagcaccatgccgccgccgacgttaatcacttcaccattgatatagcgcgcgccatcggacgccagaaacgccacacactcgccgacgtctttcgcctcgccggcgtaacccgcgggaattttgctgaccatgatttgccagacgttttccggtacgccgcgcgtcatgtcggtatcgataaagcccgggcagatggcattcaccgtgacaccttttttcgccagttcgcggcaggcggttttggtcattcccaccacgccggcttttgacgccgaatagttggtttgcccgacgttgccaagccaactggcggaagcgatattgataatgcggcccgcaccgcgctcgcgcatgcggatagcggcctgctgcatacagaggaaagtgcctttcaggttaacgtcgataaccgtgtcccagtccgcttccgttaatttgtgcagcatggcgtcgcggttgattccggcgttattcaccagaatgtctaccgggccaaacgcctcttcggcctgggaatacagggcttcgacctgcgttttttcagcgatattgcagctgataaacagcgcctgtgcgcccgattcgcgcagggaagcggcggcggcttcgccgtgtgcatcacgatcggcgataatcactcgcgcgccttcccgcgcaagcacctgggcaatgccaaagccgataccgcgtgcggcgccggtgacaatggcggttttactggcaagtttcatagcaacgttccttatgagtcagaggatgaattccgggacagatgttccgcgagaccgcagggcggcggggtgaacaaacggctgtccataacctgaagatccgcggcgatcaccggatgaaaatccatatgcgccaggatgtcgcgctcaagatcgatgccgggggcgatttccgtcagcaccggtccttccgggcgcagttcgaaaaccgcccgttcggtgacgtaatgcatggtttgtcctttggcgcgggccagttcgccgttgtaagaaatctggtttaccccggcgacgaatttacgcacctcgccttcgcggcagatatgcagcgccccgtgttcacaggcgatctccagccctttggcggtaaaagaggagcagaacacgacatggcgggcattctgggtgatatcgataaaaccgcccgcgccggggcaggatgcgccgagccgtgtggcattgacgtgcccgtgcgggtccatctcgccggcgcccataaaggtgatgtcgacccctgcgccgttgtagtagagcatttgatcctggtggctaatcatcgcgctcagattacggccgataccgaaatccacgccacccgcctgctgcccgccgtagatccctgactcgacggtgatggtgacctgctcgccgagctgttcctcatgaatgatggcgccaatcacgtcattgggtataccggtgccgagattgatgacgcagccgggggtcagatagcggcaggcaatccgcccgataagcttgcgcaggtccagcggcagcggcgcattttgcgcggcgggcagctggatatcgccgcacagcgctgggtcgaaggcccagcttgaagtctggcggtgatccgtctgcggctcttcgcacaccacaatggcgtcgatcaggttgccgggaacggtgatgcttttcggatgcagcgagcctttcgctacgcgatatttcacctgcgccagcaccttcgccccgtagcgtctggcggcgagaacggcgtgcaggacttccagcttcatcacctcttcatcggtcgtgaggttgccgtcttcatcagcatgggtgccgcgcacaatgaccacgtccagaggaagagccggataaaacagatattcgtcgccgcgaaacgtgacgtgctcgatcagattgggtcgttcgcgggtgcgggcgttcatccttccgccctctatgcgcggatcgacaaaggtaccgagaccgacgggggaaagccgccccggcagtccggcggccatcgcgctatagagatgaacgatctgcccctgcggcaggcaccaggcttccacttcgttgttgttgatcatcgccatccagcgcggcgccaggccccagtgcgaaccgataaggcgggtcaccatacccggatgggcaaagtgctggataccgcgctggcgatcgctttgccctgcggcatgcagtagcgtcaggtcacgcggttcgcccgcggtcagaaagcgcgcttcgatggcgcttaaaatggactccgccgcgccgataagcgtcatcccgacggtgcagacggtgtcgccgctggcgacccaccgcgccgcctcatgggcgtcgataaatttgctgctcactttttatcctccgttgatagcgtgatgatggattctgcgagacgctttttgagctgctgtttgctcactttgccgttgtgggtacgcggtaaagcacgggtgaaaataatgcgcgccggtagcttaaaacgggcgattttgaccttgagccagtcgaggatctcttcgctggtcaggtgatgctggccatccggcacgataaacgccacgggctcttcgccgtagaccgggctgggggtcgggatgacggcaacttcccgtactccccgataggtagagagaatgttttccagctccagtgagtaaattttctcgccgccgcgattgatcatgtccttgctgcggtctttgatgtacagccagccttcgtcgtcgagatagcccagatcgccggtacaaaaccagccctgcgcatcgcagctcgggcgtcgctcgctgtgctgccagtattcgcggatcaccacatcgccttttagccagatatggccgatttgtccggcggggaggggctgctggcgatcgttgcggatggtaatggcgagacccgggatcgcctgacctgaactgccgcatttatcgctgccccagacgtcgcccggaaaaatcgtcgcaggcgaggtcgtttcggtgaggccgtagattggctgaatcgcggtatgcgggaacagggtttttaactccttgatcagtccatcgctcaggtggccagcgccgcaggcaatcgtgcgcaatgccggaaaatcgctgggatggttggcgctctgctcacgcgcagcctggcaaagaaggataaaaatggtgggcgagccgtgcagaaaggtaatgttctgctcgcgcagggtggtgatcacctgcggggcattgaaccgatgctgcagccagatgctcgcgccgaggctaataaacagcgccaacagcgccgacaggccggtgatgtgatagataggtaccgccaggatggtgctatccgcggcggtgagattcagtttttgcgtataggcgtcaatcgcgcagagcaggttattgtgggtgataatcgcccctttaggctctccggtggtgccggaggtgaacatcatcaccgccgtatcgtcgcggttaaccgggaccggcgggcgggtcagcggttcgggaaggcagagcgcctgccattcgctgagtgaaaccgcacgcgcgtcgggggtgtttttcagccagtcctgcacggtcgcatcgaacaggacaacccggggagcgatatggcctaccagcgcctcgctttcggcctgcttaagcttggtgctgaaaggcaccacttcgatgcccaaacccagcgcggcaaaaaggacttcgcaaaaagcggggtgattgccccaggccagcagaatacggtcgcctttgcgcagcgaccagccgcgatcaagctgcgccatcgcccgctgtacccgcagatgaaaatcgcggtacagatagcgccgatcctcaaacgccagcgccagggcatccgggctgcgggcggcgctgcggctcagggcctggtacagattctggaagtcggcggaggtgctgttcatgtgtctctcctgatatcgcgtattgagtaggagtagtctggggaaattcaggagaggaaattgccgaatggctcacaatagaaaatcaacaaaacagaagcaattttgtaacattgcacaatgggcaggagagaccgggtgggggagacatatccccgaatcaaaccaacgtgaataaagccagaggacgctatcttttagacccgtgttaaccgggcctaaaagagtgaaggggtcagccctgccgcttagcgtttacaggcatcgaactcgagccgttcgccatcggggccgcgaataagcaggaagcgcacgttgtcttcttctatcggcccttcatcgagcggataaccgagcgccgccagccgctgctgcaccgcatccaggtcgctgacttccagcgccagatgatcgataccgcagcgaggggcgtcaaagggcgttccagcgggaagctgatacagctcgaggacggcgccccccatttccaggaacgcaacttcaatagtgccctgtggcgatggcttgctaaaccgctgctggcgctgaaagcccagcggttcatagaaggcaagcgaacgcgttaagtcactgacctgatagccaatatgagcaatcgtgttgataagttcgcgcatgttatacccccttacgcacgcaccagaagccgtagaaagcgacatacacaaagcacaggagcggagcgataaaggcgatttgcatattgccgccgttcatatccgagataatgcccatcaccagcggaattacggccccgccgataatcgacatcaccacgatcgagcctgcggtctgggtatctttccccatccctttgatcaccagaccaaagttcgtcggccagcatggcgccatacagaagctgaccagaatgagcgcatagaccgccagcattgaaccgctgaaaacggcaatcagtaacagggcggtggcggccagggcaaacgttccgagcagcatcgccggattcagacggttcatcaaccaggtggccacggtttttcccacggcgtaaatcaccagagaagccagcagccagtaagtcgcggagtgctcgctggtgccttgctgcacgagctgcacaaagcgaatcgtgaagctccatacgccaacctgggcgccgacgtacaaaaactgcgacaggatcccgaggcgaaagcgcgggatagcaaacaggcgtttcagcgttggccccatgctttccgtcgggagttgttgctgttgagcgggcgcgcccttgcacgacgggaatttaataaacacgaacaccagcgccagcaccaccagtacggagccgataatcagatagggcccgaccacctgaccaaccatctgatggcgtgcaacgtctgcagcggcggcgggcatcgccagcagttgttcatgactcggatcgttttcgccaaagaccatcagctggccaattaatacgccggagatcacgcccagcgagttgaagatctgcgaaaagttaatacgctgggtggaggattgaatcggacccagcaggctggagtaggtgtttgccgacgtttccagaaaagagagtccgcaggcgatcactccgaggcaggcgaggaatgcgccgtaggtcatgatctgtgcggccggaacgaacaggaagcagccgagggcgtacaggcacagcccaataataatcgccgctttataggagaaacgcttaatcagcgccgccgcgggcagggcgacaaaaaagtagccgaggaaaaaaatcgactgcaccagcgctgtctgggtatccgttaaatcgaagccctttttaaactgggcgatcaaaatatcattcaggttgcccgccatcccccatagcgcaaacaggcaacagaccagtaaaaattgcagccagggggtatggggtaaatacgcactggtgtccagtttttctttttggaccgctgcgttatcgaccttatccgtgattagcgtactcattgagctatcctcttaatgttttttatacagtagggtttatgccatttcataatcagcggcggcacggagaagccgttcctgtgcctccaggtactcaggtaaagatgaggcgccttgcttttcgacactgacggcggcataggccgccgcgaatcgggctgcggcctgtagcggttccccgcaggccagccgcgccgccagcgcgccgttgaaggcatcgcccgcaccggtagtgtctcgggggtgagaaggaaagcagggaacacgagatttcaccccatgctcgctcagcagggcgccgctggcgccgagagtgataatgacgttgcgcgcgccctgagcatgtaacacgtcggcggcctcagccgcggccgtcagactgtcaacccggcgtccggtcattaacccggcctccgtggcgttcggtgtaagtaaatccactttgcttagaacggcgtgctcaacgggctgccagggcgcgggattgagtattaccagggccccggcttgtttgccggcgtctatgacctgttcaatagcagaaagattgttctccagctgaaccagaaccacatccgcgcagccgatagcgggaatgcagccggcgatttcatcatcggtcaccgtcatattcgcgccgggatcgacggcaatcatgttttcggcatcgttaccggcgacataaatcagcgcattgccggtggggatctcttcggcgaccagcagcgtcacagcattgaagcccacgcctttcagatgacggcgggcaaaatggccgaaggtgtcattgccaatcttgccgatatagtggacatttgctcccgcttttagcgcggcggtggcctggttcgcccctttacctccggcgctggtcatacttccgcaggccactaacgactcacctggtaccggaaagcgatccaccctggcgaccatgtcgaaattgaatgaaccaaaaacacagacttttcctgacatcattcgctcctctataccagctcgggggagtgcagcgcggcggacagttcgcgggacatggtttcccaggccagctcgagcggcatatcagcgcggaataaaccgctgctgcccatcactaatatctgtgcgccggcgcccagcagcgcgcggtaggtgttgcggttacaggagccatcgacttccagcaagaagcggaggctgccggtctctttgagctgatgaagctgcgtaattttggcgagcatttcaggaataaacggctgaccggcatagcctgggtcgacggtcatcaccgtcaccttatcgagcagatgcagatagtgctggatgctctcaaccggtgtggcgggattgagcaccattcccacctctttccccgcctgacgaagcatattgataacccggaacgcttcgcggcagatggtctccggatgcagtgagaaggcgtctgcgccggcgtctaacagcgccggtataaacgaagcgggcgcttcgaccatcagatggacatcgataggaagcgaggtgtagggacggatctgcgccacaaagctggccgacaacgccagatttttgacatagtggccgtccatgatgtcgacatgcagcctgtcggctttgctgtttagaaagcgcagctgttccgtcagcttcatcatgtccatacacatcagcgagggagaaagataataacgcataaggcctcatttattccggtggtggctgaattcaggcaaagtctggccctgccgcggtaagcagcgtttcgacattgcgcgtattaaccgtcacgtcatgacggcgtactcaggcgatttgcaggctgacgttatgccaggtcatctctttttccagcagcggatcgacaaacctttcagtcaccagacagtccagctcgcccagtccgccgatacgcgcgacgcctgttcgccccagcttgctgccgtcgaccaaagccacagtctgacgggcggccagcagcatctgtttcagcagggcggcgtgggcttgcgtacccgcatacaagccgctatcgcgctccagcccctggcaggagaaaaagagcgtatcaatggcatattcgcgtagcgttcgtgaggcggtttccccgaagaacgactcttcggtcggggagaaatcgccccccagtccgacgagatgcaacgagcgtcggctcatcagagtttgtaagatgcgaatggagggcgtaatcaccgtcaacgccatctccggcatctgccgggccaaaaaccagctggtgctactcccgtccaggacaatggtctgtcccggttggagaaactgcagtgctttacgggccacgcgcattttgccttcgctgtgcagcagcgttctgtgctgaaagcttccctggctatcttcaactggcagggcggatgccgccgcccgggtcgccggcagcggattttccgccgccagcgctccaccgtggcttcgggttaagatccctttgcgttccagctcgctcagatcgcggcgaatcgtttccctggagacccgagtcgcttgcgcaatctcattcacccgcatgacgccgtgttggcccagcagttcaacaatcaaacgatgacgttccagcggcaacatagctctctcctgaagtacataatcagattacctttcccttgcgcagagcgttgagacctcgggaatgtcccacgaaggcaagctatccgcagccgaacactgtgatagcgcacgcatttcgcttcacttccgtcagcggtttgcgctatttcgcccgtgattcaggcataaacaaaaacaaacaaaaataaatgcaagattgcttttgcgcccatttatgcccgattacgcctgctctgcaaggttaacgcttatttcctgctgctaattaaaaacaaatgaaaataaaaaaatgctaatttgatcacgttattttcatttaatgcgtttttaaatggatttaagccaaatgtcagcattaaatgaaagcaattaaaaacaaaggacaggataagaccatgaatgaaacaacccatcgttttgcacgtttagttgatctgagcgcagttcaggccaccagtaccgaagcggatgttcgcgcctgcgccgagctggctgccagatacaacattatttccgtccacgtactgccttgctggacgcgctttctcagtacgttgctgccgcagcagggtacgggagaggtgatgattggcggtccggtcggctttcccggcggtgggcataccaccgataccaaggttcaggaagtgcggcagctgattgccgacggcgctcgggaagtggatatggtcgtgaatatcggcaaagtgctctccggcgattatgactatgtgcgcgaagatttgcgccgcgtggtggaagccgccgccccggtaccggccaaagtgatccttgaaacgcactatcttaatgaggagcagattcgtcgcgtgtgcgaaattgccgtagaggtggggatgaagtgggtcaaaacctctaccggctgggcgcccaccggcgccacggtggaaaaagtcaggatcatcgccgaccagcttaaaggccgaatcgatatcaaaggcgccgggggcattcgcgatctggccacggtgcgtgcgctgtaccagcttggcgtgcgccgctttggcatgagccatggcgcggtaaccaaggtgctggctgaactggagcagcacccggaacgttttcccgagctgaacgccgattaaactgagagaccgcgggcctggtggcccgccttaagacgtcaccggagttagtgatgaaagataaaatactcacgattgatgttggcactggcagtacccgcgccgctattgtgcgcattgacggcgcgatgatcggctttgcgcaaagagagtatgagcaaaccacgccgcgtgcaggttggtcagaacaggccccgtctttatggtggcaggccgcctgcgactgtatacgcgaggtgctttaccgctatcctgaaacggcagcgcaaattgcggttattggtgcttgcggacagatgcatggcaccgtccttctggacgaccgtggcgagctggtggaggatagggcgttgctgtggaatgataagcgcagccagccgcaagttgacgcctttaacgcgcgcgaaggttgggaaaagtggctggcgcatttgaataatccgcctgcggcagcatggcccgctttcaagttagcctggtggcgcgaaaatcatccggatcgctggtcgcagctcgccaaagtattaatgccgaaggactatattaatttcatgctgaccggtgccatggcgaccgattatagcgaagcgtcgtgctatttcctgatggacagcgaaacccgtagctggtcttcgcaagcctgcgaaacgtttggtctgcgggtcgatcagctcccggagcttaaactttccagcgacataatcggccaggtgacgcagcccgcagccgacctgacgggcctgccggcgggtatcccggtggttgccgggacgtcggatatggcggcctctctgctgggctcgggtgtgtatgaaccggggatggcgtctgattcaaccggcacgtcgacgctgatgacggtggtgtcgccgcggccgttacaccatccgctggttaataatctacatcttgccaacgcggcctggggcggatttacgatcctcgacgccggcggcgatgccgttcgctgggcgcggctggcacttgccgataaccagattacgcatccacagcttttacaggaagcggcggcggtgccggcgggggcagaagggctgctgtttcttccctatctgacgggagaacgtctggccgaacacacgaactcgcgggcacagttttttggcctgcagcgcaagcatcgccgcggtcatttattccgcgccgttctggaaggggtggcctttgcatcctggcgcaatcttcggcagctgcagaagtgcgggcagtatccgcaacaaatgatcgcttccggcggcggcgcgcgcagctcgctgtggcttgaaatcaaagcctcggcgtacaatctgccgatattatctacgcgtaatcaggagaatggcgtcaccggatgcggtattatcgccggggttggcgtagggttgtacgccgattttgccagcggcgtgcggcaaacggtgcagttcgaaaaactgatctcaccggatccccttctgcgggattattaccacgcctgctgcgagctttttgatacgctgtaccggcaatccgctgccttatacgacaggctggatgcgctcagcgtaggacccgactgatacgcaaaggtaagccagcgccgcgacgcgcgtaacgagctgtaaaaaagagagaggcagaatgtttgcagaagaaagacaggagaagttactcggtattctcagggaaaaacgcaaagttgctgtttctgagatgtgtgacgtctttaatgtatctggcgctaccattcgtgccgatctccgccagctggaagaggaggggttgctgacccgaacgcatggcggagccgttcttcgtacccgagcgagcttcgaacaagcatcggacgcccgcgaaattgtcaatctcagcgcgaaagaacggatcggccagcgcgcggcggcgctggttgaggatggcgatataatcgtgctggataccggtaccacgacgctacatatcgcgcgcaatattcgtgacagacagaacgtcacggtggttaccaatgattaccaaatcgcccgggagcttgaggccagtccctcgattcaaacgattctgctcggggggatcgttaagaagggataccactgcgtggtggcgatcaacggacgttccattctcgacacgctaaacgtcgataaagcatttatgggcaccaattcgctgtcgctgaaacacggcgcctgcgtggccgatatcatgctggcagaaacgaaacgaggcatggtggaacacgccagtcaggtgattattgtctgcgactacagcaagctgaataacacctcgcttgcccaatttaccgccgcagatcgaattgacacggtggtggtggatcgtctgcctgatgatgttcaggcgtatcgtaatgccggcattcaggtgatctcgctggatgaagaggagtatctttagcgcgctgctgtgacgttgtcactaaccagcgcgtcgtaaaatcccgtccatcagggcggggtaaagttttgggtattagactcacgtgccggggggatatcgaagaccaggcatggtacaggcggtccagaattgattaaagcttacccgctgactttctcagttcagtaatatccctcttgggcgattccccgaacatccgcgtatattcccggctgaaatgggacaggctttcgtaaccgaccgcataggctgctgtggtgacatcgtaatgttcattcagcatcagtcgcctggcttcattgaggcgcagccatttctgataccgtagcgggctcatccccgcaagctgcctgaaatggtggtggaaagagggcgtgctcatttgcacccgacttgccagttcctcgacgcgtaaaggtgatgcaatattggtctttaaccagtcgatagctttaccgatacggtagccatggccgtcgactgctgcaatctgtctgagatgatcggactgatcgctcatcaaaagccggtagtgtatctctctttggatcagcggcccgagaacaggaatggcttcaggttcgtcaagcaaagaaagcagacggcagaaaggctccagcaaagcatcggtaatagtacctatcccgacactcgttcccgcgtctcgttttttgaccggcggcaggcttccctgggcaattaattccattagcacgcgctggtcaagcttataggctacgccgacgcagggctgggatgtcgaagcctgcaatatttccgaactggccggcaggtcaagagaggttatcaggaatttttccgcattatattcataaggttcacccccaacccacatgatcttcgcgccatcggccaccagaacgatactgggagggaccaggcagcttaccgggggagcgggttcgtttcggcgaaacaattcgagcccttctacggcggtagggaaatcgccggtgccgggtgtgcgctgtgcaatatccctcgatagctcacccagcagtatttcaaccgatttgtcaggaatcattctgtaatgccccacacttttgacctcttttgaggttatcaacttagcagctatgaaaactgaaatacacgctttgagattaggttcagaggatcaggcaaataatgcagagtattttaataacaccttatattaaagacattcaaaataataactctgaaatgaggcagtgtcctgaaatcagggttcaccgcgagcaaatttaacccgttcaggtttaagccattttttaactgccacgacggcatcgctgcgcttgagaagtggtttgaagaaattggtacgccaacacgtcttgaacagctgaacatcaaggaagcagatctgcccgctatcgttgagaacgtccagatcaatgtcaaagcgtttggtatcgccagtgattaccggccgaaagttgtaactgaaatactcatgcatgttgtctgaaataggtccctcaatatccaatgaaaggttttaatatcatgacgctaatatcttcgacgcgcttttttaatggcgcactccttgccggggcgatggctctgatttcaacagaagttgcggtggcccagcctgcaccaggcacagcagattcttcaggccgtctggttcagacgtgggataaaactttcccaaggagcgaaaaagtggatcatcaaaaagttacttttaaaaaccgttacggcattacgctggccgcagatgtgtatcttccaaaagatcgcgggaacaagaagcttgctgcgcttgttatttccgggccttttggcgcggtaaaagagcaggcctcgggtctctatgctcagactttagcagagcgcggattcgtgacgctggcatttgatccgtcttataccggtgaaagcagtggtgaaccccgcaatattgcttcacccgatatcaataccgaagactttatggctgcagtcgattttatgggactacaaccttatgtggatcgtgaacgtatcggtgtcatcggcatctgcggcatgggggggattgccctgaacgctgttgccgtggataagcgcgtaaaagcggtcgttgccagcaccatgtatgatatgagccgcgtaatgtcaaaaggctacaatgacagcgtaacaccggagcaacgcgagcaggcgctggagaagatgagtcttcaacgctgggaagatgcagcaaacggcaaaccggcataccagccagcctataataaactgaagggcggtgaagcacagttcctcgtggactatgcggactactacatgactaaacgcggctatcatccccgagccgtcaactctggcaattcatggtccgtgacaacgccgatggcctttatgaatttcccgctcatgacctatattaaggaaatttctccgcgcccgatcctgttcatccatggtgaaaaggcgcattcgctttacttctccaaaacggcttatgaagcggcaaatcagccaaaagagctgctgattgtaaaaaatgctacccatgttgatttatatgatcgtatggacaagatcccgttcgataacatcactgcatttttcaacaaaaatcttaataaataagccatagcaccgtccggtgttttcagatgcagtgtctgtgggacaaacgacagatactgctctcttagcatggggtgttgggtattctattgttactgataaagctggcactaattcctgatgcgatattaatttccgaatattatcgagttaatcctgcgacagaaaaaagcaaccacatatgaaagaggagaggtatatgtactggaaccctgaagtattaacaagaatagatgcggccgacgacctgaaaatcgcaccgtatcatcccgatatgaatacgaccggtacgccgacatggatatgggaagtgaaggtggacaaccgacttttcgtccgagcctatagtggtatccgttcaaaatggtatcaggctgcattgtcccagcaggcaggtaagatactggctatcggacaggaattcgacgtactgttcgcaaaaccctcggaccctgagcttgaaagtaaaattgatcaggcttacctgaaaaagtactccggcagcagctatgtttccgcaatgacagggatacgcgccagggcagccacgattgagattctaccttcgtgatgtcctgtcaaagtgatgctgcctgtactgtgaggcaaaatctacctgtttaacgttcatctccctgaaactgaaggcacgtatgaaaccactctttccgagccttcaggtttttacatccttttgttgacttattctgtaaaaagattacttttcaggacatgaaaaagatacttattattgtacccgatggcggcatgctgtttgaatccgccggtattgctgacattctgatgcaggccaaccgcctgcacccggaaggtgcccgggaaatctgctaccaggtcaagctagcgacaactcaaccgcatcaggttatccatggtcagtcaggtttaaatctgctggccgaccatcgtctgcatgagattgaccctcgcgagcccctcgataccatcatgattaccggcagaggtcaaaacccgcaggaggggatggcagtggttgactggttgcgccttgccgctccccatgcccgccgcatagtctccatttgcggcggtgcgatgctgctggcgcaaaccggactgctggacggcagacgggccactacccactggaagctgctggaaaccatgcaggcggaattcccgcagatccgcgtcgagggcgggccgctctatattcaggacgaacatatctggacctctggcggggtcagttccggctttgatcttacgctggcgctggttgaagaagactatggcttcagcctggcgcgcgatatcgcccaggacttcgtcatgtatctgcgtcgcccgggaggccagctgcagtttagccgctataaccttcagcagaccgccacccagggcccgattaacgatctgctggcgtggttgctcgaaaacctcaccgccgacctcagcgtagataagctggcggaaaaagtcgccatgagtccgcgaaatttcacccgcgtctttacccgggaaaccggcgcttcgccagcgcggtacgtcgcggaagcccgcctggccgccgcgcggcagcgtttggagcagactcacgagacgctggatcgtatcgccgagcaaacgggatttggcagcagtattaacctgcgacgcttgtttgagaaacagcttaacctcactccaggtgaatatcgtcaacgatttcactgtcgcaaaatggcgtaaagtgatccttttttgtcatttacgccataacccgtccgtcctactctgactccagcgataatcgataaggagttaattatggtaaaggtcggtattaacggttttggccggatcggacgcaatgtactgcgcgcagcactgaataatccggatattcaaattgtggcaatcaacgatttgacggacagcaaaacgctggcgcatctgctgaaatacgactcgcttctcggtaagctggatgcagaggtcaccgcgggtgaaggggggcttgttgttgatggtaaacccattaccgtattcagtgaacgcaacccggccagtattccgtggcgtcagtgtgaagtcgacatcgttattgaggctacaggattattcacggaccgtgaaaaggctgctgtacatatccacagcggtggcgccaagcgcgtgattatctctgccccgggtaaaaacgatgatttaaccattgtgatgggcgttaatgagagcctttactccccggataaacactacgtgatcagcaacggaagctgcaccaccaatggtcttgcacctgctgcgcaggtcctgcaccagcatttcggtattaaacatggtctcatgaacaccacccatgcctacaccaacagccaggcgctgcacgatcagccggaaaaagatctgcgcggggctcgtgccgccgcattgtcgattgtgccttactccagcggcgcagcgaaggctctgggtaaagttattcctgagctggatgggcgtttaacgggatactcgctacgcgtccctgtgccagtggtgtccattgttgacctcaccgtcacgcttgagcgagatgtgacggtcgaagaggtgaacaatgcttttcgcgaagccgccgcagcgggacctctgaaagggatcctgggttatagcgatgaaccgctcgtctccagcgattaccagggagacccacgctcgtcgattatcgacggtctatcaacgctggtgattggcggtaatatggtcaaaattctggcgtggtacgacaatgaatggggattctctaatcgtctcgttgatctggcattgatgatggcaaagcgtgaaagctaagccactgtcgctgtattcatctgtaaaagtataagcagttcagctggatgaatagtggctcgagtatcattcatagatgaaacataacaaatctttctgaccgcgatataaaagcataaatgcccgagagagcatttatgctttttcggcgatgaacggaattgcgatatgttgtggccaggtacttcctggtggtagctaatcaccagatacaaggaaagggggaggtgaggcagagcctgtcaacatggaagccggctgcgtagggcttcagtacaccattcaacttcagctggcggttctgtttatggtcgcgatggcactcgccatttgagtgcggaaaacgaagctggcatctttttgataatcacgtctgtggctgatcaagcccggttgatacacactgcaggcggcgcgctatcaaatgagcatttcatctggcatcccgtgacgcgttcggtcagaaaatgcaacagcagtaagatatgccggacagtacaagcagcaggtgtggctgaatgaatttccctggcttttactgtaggagaacaggctgtagtgggcgaagtgattgttaaaagccatgcttgatttatcacctcgaacattttgccttatagcgcagcattcacgtgcatgaaaggaatgacggtcatagtgttgatgtgggaagaggcagctatcaaagatgacgttattgagtacgacattgcatttaacataatatacattatgcgtactcatgttgtaatggctcaatagtaatgtccgcctgtggctcaattcagatgtccgcgctatggtaagcttcactggtccgtttaaactaccgggaggcatatcatgagcgcagaaagctcaggagtgtttactttgaaagagatcaaccggatcaagattatacaggacgtcattgaacgtcgcatcacaacgcgccgtgcggccgagcacctcggtatcagcgacaggcaatgccgcagacttcttgcccgttaccgtgaaggcggaccgcttggtatggccagcagacgatgtggcatgcgtggtaaccgccagttgccacccgggctcgcagatcaggctctggaactgatcaagacgcgttatgctgatttcggtccgactctggcgcgtgaaaagctcgaagaactccacggactgtttcttggcaaagaaactgtccggcgcatcatggtgcgggctggcttatgggttccccgtaaacaacgtgccgcaaggatccctcaaccacggtaccggcgtccgtgtactggtgagctgatacaaatagatggctgtgatcacgactggtttgaaggccgtggcccggcctgcaccgcgctggtctatgttgatgatgcaaccagcaaactgatggaactgttgtttgttaaatcggagtccacgttttcttacttcgaagccacgcggcgctatatcgataagcatggtaaaccgctggcactgtacagcgataaagccggtgtttttcgtgttaacaataaacacgccacaggcggagacgggcatactcagtttgggcgagccatgcatgaactgaacatccagactatctgtgcagaaaccagtcccgccaaagggcgtgtagaacgagctcacctcactttacaggatcgtctggtcaaagagctgcggttacagggcatttgttcaatggaggctgcaaatgacttcgctgaggcctatatggctgactataaccgccgttttggcaaagtaccgcgacatgattttgacgtacaccgtgctgtagaacatgatgaggacctggggcttattttcactgttcgtgaaaaacgtaaagtctcaaaatcgttgacgatacaatatgataaaatgttgtacctgattgaagacagcgaactgagtcgccgtgcaataggtaaatatatcgatgtgtatcactatcctgatggcagaaaagagctgcgcctgaacggtacgctacttccctactctacctacgaccgactgtcagaaatcgaccagggcgcgattgtcgataacaagcgtcttggccgaaccctggagtttatcagtctggtgcagagcaagcgggataacacgcgctctcagtcaattcccgctggagatggcccttcccgacgacggccaaagcaggaagggaagaaatcccagcgctcactggataatgatgacatgctcgaagcactcaaacagcttcagtcacgttcagaggacatttttggtaaaagagcccgctgatggtactcactggccggacagtggttgctcaccagttgatattgtccggccagacccatgatgtattattcatttcgttcagcatctttatgtcctgcttttcacgggcatacttaccccataatgaatgaaaagaacgaacaatactgattaactgcttttttctttgctccggagataggctgataaaatagcagcacctgctgtcaatattatcctcaatgaaattaaaatcagagtctgatgcatattttactgttagcataatatcattcgacgttgttctctcagactctgttaatgctgattctatcaggtattcaaaggcatacatgacagacagctggtttttgtctgtctgaatataacccattgagtttctgagtattgaggactgtaccaggaccagaggccataaaagctcaacaccataaagcttatatgtatcatgttgatcatactgatgttgctcaacacgacgattaccttcccgtgctttacgaatatcataggcaagggataacataaatccgtctttaactttaatcagtgggctttcatccacgatgtaatgaatgagttcatgtaattcattcagggcttctgaatctccccacagtataaaacctgcattgttcggcgttaactcgtatcgaagcatgggctcaatcatcctgttgtttcagtcggaggaaagtctatcagtaaagagaatgagagatcaaagtggtcattttaattgagctggataacggacatttcaattgagccttgacacatgttgtagtagctaacttgagatgtccgtctctgaccaaatagacatgtccgcgctacagtctcaccacagcgatcactgctttcaaaggatgagactcatgacggcatacggaacggagtttttctcaatgagagatgtaaaccgactcaggatccttcaggatgtcatcgaccgcaacctgcgtcctggtctggcagccgaaatgctcggtatcacgccgcgccattgcagccgtctgctgaaacgttatcgtcagtccgggccactgggcatgaataaccagagtcgtggtcgcaccggaaatcgcctgctttccgcatcattgactgatcaggccctgaatatcatccgtgaacgctatgccgattttggccccacactgacgtgggaaaagctcgctgaaaatcacggtttactgatgagtttatgaccgcttataaccggcgctttggcaaagcaccccggcatgactttgatgttcaccggccacttgaaactgatgatgatctgaccgcatttttcacatggcgggaaccgcgccgtgtttcaaaatccctgacggtgcagtatgacaaagtgctctatctgattgaagacaatgagttaagccgaagggctattggcaagtacattgaggtatggcattacccggatggccggaaagagctccggctaaacggggttgtccttccctactccacctatgatcgccttcagaaaatcgaccagggggctatcgtggacaacaagcgcctcgggcgtacacttgaatttatcaaactggtacaggacaaacgcgacaataaccggtcacaggctctccctgccggagatggcccctcgcgccgacgcaggaaacccacagagaagaaatcccagcgatctctggacgaagacgatatgctcaatgcgctgaagacattacaatcacgttctgacgagattttcggtacaaggaaatgacatggagatgatggcagacataatcccatcttcatagagctgcaatgcaagagagtttaaggtccgctttgagcgaggagcggacataacggtcaatctcgtcaccagttactccaacgtaaaagtgtgattaaatcaaaaggctccatgttaataaagcatagtgatggcatgatacattaggggataaaattgctagttcaaactaatcgattgtaccttcggcctgtaatctcatcagacttaaacgatctattcaaaatttatggtgatcccgctacgaacacttttaatcctgcgggaccatatccgaacattgatcatgcaaaaatggttatgaatcgctggctcgaccattggcaaactcatagttttggaaactgggcaatttcgcttcttactaatcctgaaaaaatcatcggttttggcgggctgggaattcgtaattatgacgatatagttatcaataatcttgggtatcgcttatctacagaggcttgggggaagggtctggccacagaatttgccatatacgcgataaaatttggatttgatgttattaaattaaccgaaatttcggctgttgttcgagagaatcatctggcgtcacagaaagtgttacagaagtcggggttaagatatgtcaaagagattcatgatgttaaagatgcacctccaagccttctgtattcaatatcagtggatgagtggttaagaaagaaagctgccgctccggggttagcttaaacacgcgccccgtcgccacatcaacaaacagcaggttattgttccgatcgaacacgatcccttcgagcacgagcgacgcctgtgaaacgttgaagtacggctgggcctccacggtctgaagagaacgctcccagggcggtatggggacggcactgcatgtaagcgcgttatgatttagtccattcatgtggtttatccccggcaataatacagagggagacttcacctgcagtctccctgtgacagcaggtattaacttttatcaaactgactttcggtaaacggatcggcgcgaccgccctgcaatgggattttggcaagcgccgcatcgatttcgcgtagctcgctgtccgtcaaccggacttgcggtgcgccgctgttttctatcaggtgcggatattgcgtcgtacccgggattgggacaatccagggccgctgggccattacccaggccagcgcgaactgaaccggagtggtgtttttgcgacgggcccacgactgcgcaaattcaagcagcaccatgtttttggccagggcatcgggctggaagcgtggcaggttatgccgccgatcggtgctgtcaaaccgctggcttggattgactgctccggcaaggaagctgcgggcagtcgggcagtaaggtacgaaaccgatacccagctcttcgagcgttggaaatatccgcgtctccggttcccgccaccacatggcatactcactctgcactgcagtcacagggagtaccgcatgtgcgcggcgaattgtcctggcactcgcttccgacagtccccagtgtttcactttaccctcctggatcaacgccttcacggtttccgccacatcctcgatcggcacattcgggtcggggcgatgctgataaagaagatcgatgtggtccgttttcagacgctttagcgagccctctacggcacggcggatatggtcagggtggctgttaagggaagtgggcttcccctcctccacgccgaagccgaacttggtggcaatcaccacacgatcgcgaacgggagcgagtgcttccccgacaaattcttcactgagatgggggccatagacctcggcagtatcaaagaacgtgataccttgttcgaaggctgcccggataagcgaaaccatggctttacgatcgcgcggacctccgccgtaataacccaccatcggcaggcacccgagtcccatgctggacacctccagcgagccgagtttacgcgtggttaaggtttccttccggacgggagcagcatccgaaggggcgttcggcgtgtcctgaccagccggtttcgccatcacggcgccgctcctgccaagggtggttgcggccaaagccagaccggcgccggcgatcagaaaattgcgccggtcccgggaagcgggtacggcagcagaaggctggtcatgcatcatcttgctcataaactggaactccctataacgaagaaaggattcattaatttggtcattaccaggcataagcctggggcgcttctcccccggggccgggccagatttcgtcgagacagctcatggtgtcgtctgatagcgtgactgtcgttgcgtgaagcgcttgctggagttgttcgaccgtacgaggcccaatcagtggagcggtaacgacagggttctgcaggagccaggccagcgccacatcggaaggggattcgccgaggtcatcacataatccttcataggcttccagctgcggacgatactgttcaatttggcgggcaagcgcgggccttgctcggcgcccgcttgccatctttttcagtacgccgccaagcaaccctccggcaagtgggctccagggaatcagtcccaggccaaaatgacggcatgcgggaatgagctccagctcaatggtgcgggcagtcagattgtagagactttgctcggcgacaaggcccaggaaatgacgggccgtggcgactgactgcgcagtcgcaatgtcccagccggcgaaattgctgctaccgatataaagaacctttccctgctgaacaagcagttccatggcctgccaggtctcttcccacggtgtatgacgatcgatgtgatgcatctgatagacgtcaatatggtcggtcttaagccgtcgcaaactgtcctcgcaggccttgcgaatatggtaagcagaaagccggcgatcgttcgggcccggtcccataggctgatagacttttgtcgccagaacgatgcgttcacggcggccaccctgctgaagccagcgaccaataatttcctcggacagccccgagccttgctggatatcgggagattgttcagtgccatacacgtctgctgtatcaatgaaattgatacccgcctcaagcgcctcatccagaatgcgggcgctggtcttctcgtcggtgacgtcaccaaaattcatggttccgagacaaaggcggctgactttcaggccggtgcggccaagatgcgtatagttcataaacggctccgttagatgagtgttccgccctggcctaccagccagagcgcatgattttcaagaataacgaagcacaacgtgtacagtgagtggacgtgcatgaatggacttgtgaaaaaaattcagcaatggattagccctaatcggtctaaggtgtatatcatttcttcatcaacgcattcgggttttaacgccgcataaggaaaactattctgtatgcaaataagcagagctgatgttgccgatcttatttatttcatggcgattgcacgtcatcgcagcttcagccgtgcggcaattgaattaggcgtcagtgcatcagcgctgagtcatgccctgaagggactggaaacccggctcggagttcgcctgcttaatcgcacgaccaagagcgtcacccctacggcagctggtgaggaactggttcagtctgttcttcagcctttcgacaccatagaaggcgcgcttgaatcgcttaaccggtatcgcaatacccctaccggtcgtatccgcatcaatgcagccgttgaagcggcaaatcttttgcttgcgccggtcatgcccgcttttatggatcgctatcccgatattgaaatcgatattgtggccagcaaccgaatggttgacgtgactgatgcgggcttcgatgccggcatccgctacggtggcaccgtcccggaggacatggttgcccggcgtttatctgccgatattcgctgggttatcgcggcctcccctgattacctggaacgctacggaacgcctgaacatccggatgatttattacaccatcgctgcatcagcaatcgtctcggtgacgatcgggtttatcgctgggaacttgcgcgagacggcgaaacataccaaatgacagtgccaggctcagtgacggtcaatcatgccgaaacgggtctggtggccgtattgggcggggctggcctaatgtattttccggagcctcttgttgcaccctatgtcaaggatggacggctccgtctggtgcttacggaatggtccccactggaggaaggttttcatatctattattcaagccgccggcaattgccgaccgggcttcgccttctgattgagttcatacaggaggccaggccgctggggttgtgaaatagtgcctccatactgaacgatgcgttatcggctttatcgccctgtcgcttattcagaaagctcagttgcaggaagccgcagggagtctgcaaggcgtgctgtttgataataatggagaaacaagaggtaacgctgtgaaaaattacaaaaaaaacatgggttgtagtttatttgaaggctagcccaggtgacccgcatcaataagtgccatacgaagatgtttctgaatgaaatccgctttataaatgctgtatcggtggctgtcattttcacataataacatcgcgctttttttcattaaagcgtactgaatggctacgtcattgtgtttaataaggtaatcacggaatgccaggtgttttatgatttgagcatccccggtggtaaacgcatggatatgatgactacgctgacttccaccttttgtaaagtacctacgatttaaaatgccgttttcaccacgcacagtatatcctacaccctccattgcctgattcaaactgtccagttcttcaagattagcaacttcgattaatatatctattactggcttagctgataatccaggcaccgaggtgctaccaatatgatgaatccgggatatcactttaccaagcgtcatctgcaacagagtacgttcgttctcaaataaagtcggccacatttcatcataatcaactacagtcaatattcgcatgttcaacagtcacaccttttaaggaaatttaagcagtcacaataacataaatcgcctctgctgacttgaaggcatttataatctgtatctgtcctcataattttcaaccatcgtctgacaagatgccctaaacccctttgtagtgctctttattcagaccatacttcttcattctgagataaagttttttacgcggtatcagcagatactccgccacctcattaatacgtccctggtggatattcagcgcttcggtgatgatctgccgttcgacgtcctcaacccgctgatccagcggcgtcggctcgccaatgtgcatcagcggattaaccgtttctgcgagtggtaatacccctactgcaaacagctcggcggcgttcgccagttcgcgaacgttatttggccacacccggcgcatcatccccttcaacagaccagcatccacctccgggacgggatgattcagccgttgacaggttttttgcaaatagtgatgaaacagcggctcgatatcatcaggtcgctttgacagaggctggcagccaatttgcgtcatcgcgaagcagtaatagagttccgccactatctggctgctggcggccaactccaccagcgaagcgctaccgataccaatcaggcgaaaaggccgcttctcatgactctgcagctgtaccagctgatgctgttgctcgtgagtcagatgctcggggtgacttaagaccagcgtcccgccctgggcctgggcgatcagttcattaagcgtatgggcgttagccggagtcagctcgcaggcgataaacggaccttcagcgtgccgtcctaactggtgcaggtaacgcgcgccggtcatgcggccggttcccggctcgccgtaaagccataccgcaatatccgtttctgccagctgctgaaggcgctggcgataccgaaccgtccattggctgcggccaataagctcaacctgtaatttttgctgacaatactggcgacgggcgataaccgattgcctctgacgcagcgcggcgtccaccagcgtgagcagtttgcccggatcgatcggcttttgcaggaaatcccaggccccttttttcaccgcctccaccgccatcggcacatcgccgtgaccggtgataagcagaatcggcagcagatcgtcatcctgatgaaacaacgtcattaaatcgataccggagcagccgggcatgcagacatcgcttaaaacgatgccgggccagtccttcggcacctgctcccgcgcatcaaacggattattacaggcactgacatgataccccgcttgctcaagcagctgcgtataggcatccagcacatcggcatcatcgtcaatcagcagaatcgaacagttattactcaacatcttttacatccgtcaaattgaattccagcaccacgcaggcactgcgtgtaaacgtcgacgccagacgcaacgccccttccatttgcgtcatcagcgaaacacatatcgaaagccctattccgagccccacggttttactggtagtgaacggctttaacagcgaagggagtaaggccgcaggccagccagggccgttatcggcaatcaacacgcacagccttccgccctggatttgccagctcacggtgatttgcgcggcgtgcgggcaggcgtcgagggcattggacagcacgttcaccagcacctgatggacgcgcacttcgtccccctggatccagacagtgtcatccggtatcaccagcgtcccctgctgaggcttatgacgcatcgccagcagttcccacgccacggtaaacgtctgacgcaaatcgaccggatgcagcggcgtttccagttctgcgcggcgggtaaactggcgcagggagcggataatcgcgtcaatgcggttgatcagcccttctgctttgcttaacgtcgtccgcgcctgctccgcctgtccctgttcgatcgcccttcccgccgtaaaaagatacatcgacagcgcgttcagcggctgattaatctcatgcgccagggtggtcatcgtctgccccaccaccgccagtttagcggtctggatcagctcgtcctgcgtggcgcgcagatcggcctcaatcgcttttcgctcgccaatctcctgttccagctgctgtttttgcgcattaagctgacccagggtatgacgaagcaaaccggcaatacgtcccagctcgtcgcgcccgtaaaccggaatggtcgcctcggtccggcccagaccaatctgcaccaccgcctgattcagcgcggtaaagcgtttcaccagccgcgagcgaataaaataatggtttagcccccatgccagcagcagcgccagcaacgtcgccaccaggattaacccgccgctgacccggacaatctgcgccatacgctgattaaacatctgcatctgctggtgactgctgccaagctgggcttccagcagcgttctgaagcgccccagcgtcgcttctctggaccggctggcttccacgagcgctttttgcgcgctaacatagtcgcgcatggtatccggcatattatttttcaccatgccaatttccagcagctcatcaatcgtttgtcgcagggtaatggtgctcggccagtcatccagcgcacggatattttcatccgccgtttttttcaggttttcaagatagcggatatgcgtctccaccagcatgccgtcatcattcccggatttcagttcattgagcctgtcgcgcaggtcgtcaacgatctgattttcaatacgagccagggtatagacctgctgctgttcgttctgcacttcccgggcgcgtttcagatactgcctcgcatccccctgtcgggcttcaatctgatcgagcagcgttccctgttgccaggtaaaatcctgcaccagcgaattcagctcggtggtgaaatcatcgtgcagccagtcgatccgcgccgcaagctctcccaccttttcacgaaccagaaacatgttgtagagcacgcgatccagttccgccagcagcgcgcggctgtcctgcaatatcacccccaactgctggcgttctgccggcgacaacccctgacttagccgttctattttgtccagatgctggataatctggttgcgcagctgcagtcgtaccgtggtatttggcgccagcagaaattcattgagctgatcgaccaccaggttgagattcccttcaatcagaaacgccgcatggatgcgcggaaaatactcatccagcgaatagcggatctgcgaactttgttcatgccaggaatagaggcttacgctgctgacaatcagcgtaagcagcgcccccgtcagaaatgccccgcgcagactgctactgatactgatttgccgcaggcgttgcagcatggacctgtccgtcatttcagttcttccagtttagtaatcgcctgccgctggttgttgagaaaccagagctgccactccatcatctgctgttccgcaaaacttttgttgtcgaactgagccagccaggcttcatcctcgctgctggccggatccaccgggacacgggtgagcagcgcccgtatctcgggtagcggacgcttaagacggacctccgcgctatgcagcgctcgccaggcgtctttgagctgagcaagacgaaagctaatcgccgtatcaaacatccgctgaaccaaacgctgacgtttgaggatcaatcgatagtttaatggcggttgattcatcagcatcgcctgctgcgccgcccgtggattgcctggcgccagcggtgttaccggatacttcccggtattagcgtcggcgaggatcgtctggccctccggacttaacagatagcgaataaaccgccgcgcttcgctggcgtgctggctgtttttaagcactgcgacataggtcggcgaaaccgccgactgggggaaataggtaaaagccaggtgcggatcgttcagtagcagattggcgtaattatcaatcaccggaccagccacgcccaggccgcttttaatcttatctgccaccccaaagctacgggatgaaatggtcacgaggtttcccgccgtcgtcaacagcgtttcccatcctttaatccagcctttttgttgcagcagcgactccaccatcagatggttggtatccgaacgcgacggactgctcatcagcagcgccccctgataacggggatcggtcaggtcatcccagtccgctggcgcaggcagatgccgggtcatcagcgctgagcgattcatcagcaaaccgaacccggagatcgccacggccacggaggtggagcgaatggattccggcaccagatgttggctgactgccggcgcaccgctgaacggcgccagtttttgatgctcctgaagatgctgcagcagcatcggcgacgaagtcaggatcagatcgacattttcggcatttgccgtatcaagcaactgttccagcgaggcgctggtgcggttgagcgtccttatcatcaccgaccccggctctttctgccagcgatcgataatccacacggtggcgctgggagaaaatgtcgtcgccatcaccagctcattgccttgcgccgcacagggtctcagccatgcgctcagcagcagcagcgcgaacattttgctcattatcccgaccccacgaagaaatatgtttgtgatcccgttcataaatattgaaataccgtaaaaaccgcgttgagacaaaacttacccgtttatgacatctggtgaattaatcgccgcgagcggaaaaatagtcaaacgggcgtccgggaatatcgggaaagattaccagataatgattaggcaatttgttagtgtccgcacaagccggacataaaatcagcgcaaaattaattgcgcaaaatctcgctcatgccagatgggtcaaaaacaacccgtccctgcattattttgagtcaattttgactcatttcgacgatttgaattttttagccgcttatttcacccttcggggtaattactcctgatgttcatatcaatataaatacaggtgacgacatgttatcattattaaaaaaaggcccgtcggcgaataaagttcctgctgagaaaattcaggcaacctatggtcgataccgtatgcaggcgctgctaagcgtatttctgggatacctggcgtactatatcgtgcgcaataacttcaccttatccacgccctatctgaaagaacagttagacctcagcgccacgcagatcggtttgctcagcagctgtatgctcatcgcctacgggatcagtaaaggcgtaatgagcagcctcgcggataaagccagcccgaaagtctttatggcctgtggcctggtgctgtgcgctatcgtcaacgtcgggttaggattcagtaccgcattctgggtcttcgctgcgctggttgtcctgaacggcctgtttcagggtatgggggtcggcccctcttttattactattgcgaactggttcccgcgccgtgagcgtggccgcgtaggggcgttctggaacatttcccataacgtcggcggcggaattgtcgccccgatcgtcggcgccgcattcgccattctcggcaccgagcactggcagagcgccagctacattgtaccggcctgcgtggcggtggtattcgccattagcgtactggtgctgggtaagggttcgccgcgcgaggaaggtctgccttcgctggcagagatgatgccggaagagaaagtggtgctgaagaccaaacacggccagaaagcgccggagaacatgagcgcatttcagatcttctgtacctacgtactgcgtaacaaaaacgcctggtatgtctcctttgtggatgtgtttgtctatatggtgcgtttcggcatgatcagctggctgccaatttacctgctgacggtgaaacatttttccaaagaacaaatgagcgtcgcattcctgttttttgagtgggcggcgattccgtctactctgctggccggctggctctccgacaagctgtttaaagggcgccggatgccgttagccataatctgtatgacgctaatcttcatctgtctgatcggctactggaaaagcgaatcgctactgatggtcacggtattcgcggcaattgtgggctgccttatttatgtcccgcagtttctggcctcggtccagaccatggaaatcgtccccagctttgccgtcggttcagccgtgggtctgcgcggatttatgagctatatctttggcgcatcgttaggcaccagcctgttcggcgtaatggtcgataaaatgggctggcacggcgggttctatctgctgatgggcgggatcgtctgctgcatactcttctgctacctctctcatcgcggcgcgctggaacttgagcaacagcgtaaaatcaccgagcaggaagaggcccgactggcactggctgacgcacagtaagcgcctgaacccgggggaacaaagagccagcttgctggctcttttgccgttgatagaggaatagatgtccgcggcggcttccgacagcggtataaagcaagtattcctgccatcactgatgttgctgctgagtggcctacttcgccgggataatcagcacctgacccggatagattttgtcgggatgggtcagcatcggtttattggcttcaaaaatgcgttgatactcattggccgagccatacatcgcttttgagattgcgctcagagtgtcaccggatttgaccgtgtaaaaacgactttccgccccgctttgcgtcaccttaacgccgtcactgacctggcctacgccagtgacattcccgaccgcaaccagaattttttccttatcctcctgcgaagcgacatcaccagtgaccgttgcggtgccatcttccgcaacatcaatattgaccttttcggcgccaggcagattaagtccatcgatatgttttttcagcttttcagcccgatcttctttactgtcgccggagacggcatcccatattttctcgcccgcttctttcacaaaatttaataatcccatctttccatacctccacgactgttacatgaacacatgttcctcggccccgttgacccaatgttcgggatattggttttgatatccaccatcgcgacaactgcttgaggcagcacaagctgccatcaaagtataatcaatgagcgtcaaagtgcaggaaatttgccatggtatggcaggaaagtctgtattccggcaaggcgacacgaaactaaagcggacattatccccccgaacacaaggcacctggcgcagaggctgattgattgtgaaaggatatgagaccttaaatggcaggctgggagttggcaccccgcctgagggctcctgattctggtcgccaatgctttcaagacgtttttcttactgagatcgtctcaaaaacattcgctgatttctgccgcagcagctacagtaaatccaggttaaactggtatgaccacacaaggcgagactcatggaatctgtcatcatccccgtaagccagggcggctttgtcgccgccacgctctggcaaagacacaaagccaaagcattggtgatcgttcacccggcgacggccgttgtacagggattttataaaggattcgctgaatacctttataaaagggggtttagtgtcattacttatgattaccggggcactggtctttcgaagtccgggagagtccgtcacaacaaaaacaccatgtccgactggatcgagcaggacgtcggatgcatcaccgcgtgggcgaaagcccgagcccctggccttaccctgctggcgattgggcacagtattggcgggcatgccgtgctgttatcttccgcctccaccgacctgcgagccgccgtcatggttgcctcacacgcaggcgtgacaagcactatcagccaaacgaaggaaaagctgcgagtatggtgtttactgcgcgttttggggccggcactttgccggctctttgggtatatgccagccagacgtctcgggctgggtgaagatttaccggctccggcgatgcttcagtggggacgctggagcgcgatgcctgaatatttctatgacgacccggggtgggatgcgcgtcagcgggcaggaaagataaccttacctattctggtgttgggttttgatgacgacccttgggctaatacagaagccatctcacgcctgcttgctccagcgcaaaacgcaaaaatagaacgccgtgaaatacggcgggcggattacggactttcatccattggtcatatgggcttctttcgtacccggaatgcggagaaattatggcccctcgtcgcacaatggctggagagacattgcccggataagaggcggacgacctgagcaatatttcaggagacgccgcttccggcgcctcctgttcttcacctcgcggctactcctcgtacgccgcgtgatggaaatcaatttcccactgcagcacctcgccgtaaagcgccgataacgcctgcttttcgtcttcactcagcgccatggcgcagcggtcgagttcgttttttagccagagagcctgctgataaaattcgtcctccgcgtgcatttccacccagcgtcgtaaatcagcatcgctctgataatgttcgctcgcccgtcggcaccagaaatagtacatccattccgcaccgaacatcagggtcacaatctgctcatagctgccctcgtgggcggtccgcagcataccgtcgcgaaagcgccgtaccccgggcaaatcatccgggtactcagcgggatcgatctgccgtgctgacaacacctgttcaaaccacgcgatctgtatatcaaccagggcattcagcacgccaatcagccagcgctgctgttgaatacccggcgctttgctgaccccgagggcaaaaatcgcgattgccgtcgcgacaaagttgccctcaaacaccagatagcggttgaagacgactgtcggcagacgatcctgttcgatatcagtcacaaacgggtgctgctgcatcgcctgccacgccggttgatgttcgcgcagcaggcgttcgctaaacgcttccattatgcctcctccagcgcggcctgcgcgaccgacataaaatgtttcacccgggccagctcaacatcgttccaccagacgccatcgaccttcattgtactggccacaatgaccccctgagtccgcccgaggatctgcttcacgttagccggtgtcaccccggagcccaccaggagcggtagttccgtcgccgcgcggatctcgtcaatttccgccatcgtggcgctatcgcccgtacgctggccggtggcgatcaccgcgtcagcctcgaagaaatcgacatcgcgcgtcagttcctgaatcgaacgatcggcgacaatggcatggctaccgtgcttaacgtggctatcggcaaaaacgcgaatatgttcagcgcgcagcatactgcggtagcgcagcgccttagcggccgccccttctataaatccttcgttggcgatataggcgttggcccactggtttacccggacgaaatcggcgcctcccgccagggcgatcgccattgccgggatcgccgcgttagccagaacgttaatgcccagcggcacagcaaaacgttcacgaactttctcggtaatgaccgccatcagcgcggaggtttcatggccgatatcctcaggtttagagaaaggaatatcgccatgattttcaataatcagaccatgaacaccgcctgaaatataattttcagcatcgcgaagcgcacgttcaacaatatccgagactgattttcctcgatattttggcgagccaggaaatgggtcgcaatgaataacaccaataacagccttgcttcgtgaaaaaatagcttgtattgcattcgttttttctgctgagatagcaaccatcttatccatcctgttaagggaacactatgcgtgtttacgttactggtaatattaccgtagatgaaacctggtccattccggatataccgaaaaaaggagcctccattcacggcgttaaagtgtcgcaggatatcggcggtaaaggcgcgaaccaggcgattatattatcccgctgcggaatagagacgcgtttaattgccgccacgggtaatgacagcaacggcgcgtggatccgccagcagataaaaaatgaaccactgatgctactacccgacggccatttcaatcaacatagcgatacctcgattattttaaatagcgctgatggcgacaacgccatcattaccactacggcggcggccgatacattcagcctggatgaaatgattccgcatatggcggatgccgtcgctggcgatattctgctacagcagggcaatttctccctcgataaaacgcgggcgctgttccagtacgccagaagccgcggcatgacgacggtattcaacccctcacctgtcaatcctgacttttgccatctgtggcccctcatcgacatcgcggtggtcaatgaatccgaggccgagctgctccagccatacggggtgaaaaccttagtgattacccagggcgccgcaggcgcctggctggtccaggagggccagcgtcagttttgtcccgccgtgcccgccgaggcgcttgatactaccggcgcgggcgacacgttcctcgccgtcatgttggcctccgccctgctgcgcggcgtcgcgccggatgcgctggcgctggcgcacgccagtcgcgctgccgccattacggttagccgccgggggacgctcagcgcgtttcccggcagccgtgagctcgccgccctgttaaccacggacggggcgcgctgacctacttaaacagcggacggtatgaatcgacgttcgctttggttaccaccgtcgccggaaccagaatggttttcggcacggttttacccgacgtgatgctgttcagcgcattcagggcttcggcgcccatcttttccgggtcctgctgcagtacggcggtgacgtagccgccgtcaataccggaaatcgccttcgccgtcagatcccagccaaagactttaatatccttctgccgcccctggttttctacggcggcgatagcgccgagcagcgcgggttcgccggtggcataaatcgctgtcagatccggattaccggtgatcaggttttccgccgcggtcatcgctttatcctgcacattctgcccgtcgaccacgttagcgatagtaatcttcggattgcttttcagcgtctcttcgaaccctttctgccgctggttctgaatggccgaattcagcgcgccgactatacccagtcgcgcctggccgcccatctctttctgcacgtagtccacgaagtattgaccgataattctgccgccttcaatattatcaacgccgacctgagctgcctgtggcccggccggtaatacggcatcaatcgcaatcaccggaatgtttgcggcggcggcttctttaaccgctggcatgatcccgttaacgtcgatagcagcaaccagaatgcctttaacgccttgctgaatatagttttctatcgcgtcgttttgcgccacgggattatcgttagagttaaaaataactaaatccttgccactggctttggccgcatcctgtgcgcctttattcatcagattaaagaacagcgcctgttggttgatttgtaccagcgcataagtcggaccggcagcgctggcggcagaaataaaactcatggatgccagcatggtcgtggcgacagcaaggaaacgcagttttccggtgtgaaataacatcatcagtatcctcgtcgggaatagttgatagccagcagagttccgcgccgcatgcgaacgcagaaggattattttttttggcgggcaaatatcgtctatatcgccagaacaatcattgaacgttcggcggatacctgcttaatgtcatcccggcaaccggtccgtgtcggtgcgcgactggaataacttaaacggggttgggaatgacttcccggataatgcggtaaactgcctatacaattctctgctgattaaaatttgtcaagcatttatttttggtgattgttcgcagagaaattgctgtatccaccgcgcttaactatgttacagatagccgattctggcacaaatggcgcaggaaatgagtataaaacgtgtattgttatccgatgtggcaaagctggccgggctgtcgaaggcgaccctgtcgcgctatatgaacaacagtattgtgctgccgcaggacaccatcgaccgcatcgaaaccgccattcgcgaactggactatcgcggcaatagcctggcacgccgtcttagcaaaggcggcagcgaaacgcttggcctggtgcttcccgatattaccaaccccttctttgccgaactggccgacgcagccgaagaggccgcttctgccagcggctacagcctggtgctgtgtatcacccgcaacaacccggaaaaagagtgccagttcattcgctggctggatacctgccaggtcgacggtctgctgttcaccaccaaccgccccgataatggcctgctgcgcaaggaagtccagcgtcacgaacggattgtcctgctggatgaagatattcccggcagtaaggtaccgaaagtgtttgccgataacgtccagggcgggcggatcgccaccgaaaaactgatcgccgccggacatcgccatatcgctttcgtcggtggcccggacaagctgatgagcgtccgcgagcgctatcagggcttttgcaccgcgatggagcaagcgggcctgagctggccgcccgaatgggtgatgtatggcgactaccagcgcgagtttggccagcaagcgttgcggtacctgttcagccaacaggttcgccctaccgccgtcttcgctgccagcgactatctggtgctcggtctgctcgacggcttgcgcgccagtgggctccaggcgccagaggcgctatcgttagtcggcttcgatgacgccaactatgccgattttacccagccgcggatctccactatccgtcagcccgcccgcgaactgggccgcactgcggtgaacatcatgatgcgcctgctaaacgacgatccggatatccctgcggaaacccgcctgccggttgaatggattggccgcgactcgatcaagatttgttaagcccgtcccaaaatggcgcaaaagcgcccgcttttggcgcaaaaaacgatcaattaacaatttattcactataatcagtaaaccggtttaccggattgtattcaattaagtgtattgaatacataaggttaagttacagggctgctgtgtggttactgccctggcacggatgctgcaatgttcttactggcgaacaaatatcttacatagcgtttgtcctgactgcactggcgagtgctctggtccgcaggtaaaccggtttactagattgtaaaccgtgtcggatagagtctctcccgcaggatggcgaacattttcccggccacagcgatgggagttatcagatgcagcagccacaaactaccccgccaagggtagagatgatcaatatcaccaagacctacgggtcgatacgctcattgcgcggagtcaaccttgagctggccccgggcgaagtgctgggcttagtgggcgataacggcgcggggaaatccaccttgaccaaagtgctctctggcgcggtgatcccctccagcggcacgattcgtatcgacggtgaacagcaacagtttacgaatccggccgattcacgccgttgccatatcgagatggtctaccaggatctgtcgctctgtgacacggtcgatgtcgcgggcaatctgtttatgggccgtgagccgatgaaatcggtcctcggcatcccctttctcgacgaggccaaaatgcacgccgatgccagagagatgcttaaagggctcgggatctccattccggatacccggctgctggtgcgaaatctctccggcggccagcgccaggctatagccatcgcccgcgccgcggcctttgacccgaaagtgctgattatggatgaacccaccgccgcgctggccgtcgcggaagttgaagcggttctggagctcattcgccgcgtttccgctcgcggggtgagcgtgattctgattacccaccgcctgcaggacctgttcctggtctgcgaccggatcatggtgatgtatgaaggtaccaacgtcgccgacagacgggtgtccgacaccagcctgagcgatatcgttaacctgattgtgggcgaaaaattcaccgcccgctctgcggcagcacattgaggtaacaggatgagtatcatgaatttaagcagctcacgcatgatccagcattcgctgccgcgccgcctgctgcataaccattcaggcgtagtcagcatcgcgctctttttcgtcttctgctgcgtggtgttttcgctgatcaccagcaactttctcaccggcaccaactggctcaacattatccgtcagagcgccccgctgctgatcgtcgcgacggcaatgactctggtcattaccaccggcggtatcgatctgtcggtaggctccaccctggcgctggtcggcgcgctctccgctatcgccctgaatagctggggtctgccgtggccggtggtactcctcggcggcttgctgctaggcggattcgttggcgccatcaacggcttctttattgcctatgaaggcattccggcgtttatcgtcacgctcgccaccctggccgtagttcgcggcatcgcgctgctggtcacccagggctactcgattccggtaccggctgacagcctgtttacctttatcggacgcgcgtgggtcgtcgggatccccatgcccgcactgctcggcattctgattctgctgatcgggcatatcgttctcaaccatatgcgctttggccgctacgtgaccgccatcggcgctaacgccgaaggcgcgcggcgcagcggcattaacaccaaagcggtcaccatgaaggtctatatcatcagcggaatggccgccgcgctggcggggatgatcattaccgcacgcctcggcagcggctcctccaaccagggcgaaggctttgaactgcaggtcattgctgccgttgtgctaggcagcaccagtctgtttggcggcttcggaactattattggcacgctgctgggcgcactgtcgattgcggtcattcagaacgggctgatcctgtcgcatatttcgccgttttacacccagatatccaccggcaccattatcctgctggctatctggctgaacacccgcattctcaacccgacgcgctccgcggcaaaaggatagctgatgaaaggttcaatttttcgccatccctccccgctgccggttggcgttagcagcggttatgtaatgactgtgcttggcccactgccgattaacgaaatgggcgttactctgatgcatgagcatattctgctggatgcctccggcaaatgggtgccgccctgctgctgcagcgatcgccatcttgccgaaatgccggtgaaaatggaaaaccttggcgaactgtcgctcaacccgctgatgagccgcgataactgtcagctgtttgatgtcgacgttgcgattgacgagctgactaaatatcgcgcccttggcggagaaacggtagtcgacccgaccaatatcggcattggccgcgatccgaaagcgctggcgcgcatcgcgcggctgaccggtctgaacatcattatgggtaccgggctctatctggaaccttcgcaccctgagtgggtaaaaatcagcagcgtcgaacagctgaccgaacggctgatttacgatcttggcggcgcggaggagaaaccggaggtgctcgccgggctcatcggcgaaatcggtatctccagccgctttacgccggatgaggagaaatccctgcgcgctgcgggtcgggccagcgccgcgaccggcgtgccgatcgaggtccatctgcccggctgggagcggctgggccatcgggtgctggatattctcgagcaggaaggcgccgatttacgccataccgtgctgtgccatatgaatcccagctttgccgataagcgctaccagcgcgaactggcgcagcgcggggcgtttctcgaatacgacatgattggcatgagctattactacgccgacgagtcggcgcagtcgccctccgacgaggagaacgcccgcgcgatccgcgagctgattgacgacggctacatccagcaaattctgctgtcgcaggacgtcttcctgaaaaccatgctcacccgctacggcggccacggttatggctacatactcaagcattttgttccccgtctgcggcgccacggcgtcagcggcgaacaacttgaaaccttaatgattggaaacccccagcgggtctttggcggataaaaggaaacgtcatcatgcagaaaaaaatcttactggtcggtgagtcctggaccagcacgtcaacgcacgttaaaggcttcgaccagtttgccaccgccacctggcacaccggcgcaacggactttctggccgcgctcgccgacagtccctatgccattacctatatgcccgcccacgcggcggcgaccgactttccgctgacgctggaagcgctgcaggagtgggatgcgattattctctcggacattggcgccaatacgctgctgctgcatccggacacctggctgaagagccgccgaaccgccaaccgtttaacgctcctgcatgattacgtggccggcgggggggcgctgatgatgatcggcggctattacagcttccagggaatcaacggcggcgcgcgctaccgccataccgaggtggagaaagtgctgccggtacgctgcctggcctgggacgatcgcattgaaaccccggaaggctgctatgccgaagtgacggagtctcaccccctgtttaacgatattccgggcgaatggccgtggctgctgggctataacgaagttgaaatgcacccggaaggcaaactgctggcgaccgtggccggtaccggtcatccgctgttggctgttcgcgaatatcagcagggtcgctcgctggtgtggaccagcgacatgtcggcgcactggttgccggaagagtttgccaaatggcccggctatcgccagctgtggattaactgcctcgactggctgacggaacgccgctgatgaccgcgacccttgagctcgcccggcagctgctgggctttaacaccatcaacccgccgggcagcgaagccgactgcatgcggttcttcgccgactggcttgacgatagcggttttgaggtttcgctgtcgtcgttcggcgaaggacgctgcaatcttatcgccagcctgcccggggcgaagagcggtaaaccgctggcctttaccggacatctggataccgtcccgctgggaaatgcccgctggcagtacgatcctttcggctcgcagatggaagacgggcgtctttatggccgcggatccagcgatatgaaagcggcgatagcggcgtttgccgtcgcctgcgttcatcagcgggaagcgatcctcgccggacgcggcgcggtattgctgataaccggcggagaagagaccggctgcgacggcgcgcgggcgctgatcgcctccgcaacgttgccggaggtgggcgcgctgatcgtcggtgaacccaccgccaactatccggttatcggccataaaggcgcgctctggctacgctgcgaaacgcgggggaaaaccgcccacggcgcgatgccggagctggggatcaatgctatctatcttgcggcggatgcgttgggtaagattcagcatttttcgccaggcgcgccgcatccgctaatgaagcaacccaccctcaacgtcggacgcatagaaggcggactcaatattaattccgtaccggaccgcacgcgttttgatgtcgatatccgcagcgcgcccaatttacagcacgccactatccgggagcgcttgacgacgctgcttggcgaaagcgtcaccgtctccacgctggtcgacctgcccgccgtcctcagccgggaggatcatgcgtggattaagcaggtttatcaacgctgtcagccgctgcacgctgagccgattgcgccgcgcgtggtgccctactttaccgacgcctcgctgctgctgcctgcattgggcgatccgccctgtattattctcggccccggcgagccgtcgatggcgcatcaaaccgacgaatactgcctgctcagccgactggcggaggccgaacagctatacggtgacatcattcgcgactggatggcatcaccgcccgcgacgaaagtaaaaaatgagtgacactgtcactgaaagcgcgtgccatgcaattcagcgtttgaataatatcgcggaataacagaggataaccgcctcgtacacgacggtatcaccaccagcaaggaggcttagcatgtccgtgaaaaccaacgctgtgctcgtttgcaccctctctttactcctttccgcctgctcgggtcgtgcttctgcgccgggcagcgccgaagacgctaaaatatcggctgaagtggataagatacttcgcgattatcaaacgggttccgatacttcaccccaggccaatgcctcacgctatctggcacggatccaggcggctatcttcgctaacatagaccagccggcctcctggcaagggcaaaaatgctcggtgcgctttatgctgcagcgtgacgggacggtgcaggatccaacggtcgagagcggcgatcggccattctgcgcgcaggtgatgtccgcgctgaaaaaagccaacatcccgcccgcgccggacgaaaaaacctatcaaaccttcagtcatgtcgtgctggacgtgaagccctgagcttgcccgcagaaatggccccggccatcaccagggccatttcgaacaagataagctgacagccctgcttaacagacgctttttggcgatcagcgaggaatgattcaatagtaacaggctggcgcaagcctgttttttttccattcttcaggatcgtggccgggtatgaataccgcatgatatcgctcggtaagctgacgcagctttcgcacagactgagcgacatcagtagcagacgtcattagccccgggagcgccttctcatggtaatgatctaaggtataagccgcatcaatcgctagcgtaaaatttgtaccacccggtaagcggataagaaaagattgatggcccggtgaatgccctggggtgaaaatacattgtaacgtgccatcaccgtaaaggtcatagtgatcatcggacaacccgttcagaaatagccagttaagttggggacgatcgaaatcgcgtcggcaataggctcccgaagtaaaccagtcaggggcaaaggcatattcatactcttgcctctggacaacatgcgtagcatgggggaagcgaccaattgctcccgtatgatcagagtgcaaatgggacaggaccacatagcggagatcctcaggagcaatgccaatcctcttaagttgttccacgcaaccctgttcttctgacatcaccggtttaaactgctctacagcacttccccaataaccgctgggatctttcaatccttcgacagccagaccgccgtcaatcagcgtaaacccatccggatgggtcagcagaaaccaggggacagggatctcataatgctctcccacgccctgattcatccggatatgctgatatcgacaatgctgtgttcctgactggaacatgaaaagctttatctctggcatcattattttccaccaataaatcaattaaatagattgaaatttagcctgactcaggccttgagtctggatttttcatcatttcgcagtaaagcagtagatacctgtccccacttacatttatcggtaaagccaatataattggtgaatggatctcttctcagcaatgcgcatatttatcagggtggttgaacggggcagcatgtcggctgcagcccgcgatctcggtattggccagcccgccgtgagtgaaagaatagaaaaactggaagctcatcttgggacacgtttgcttaggcgcaacacgcgtaacatgtctctaacgcaaagcggtaacgtgttttatgagcgaagcaaaacggccgttcaggcggcagagcatgctctttctgtgaatgaggaaaatcaggggctgcaaggcaaaatccgtattgccgcgccctattccgccggagaaagcctgctgatgcctgcattgttgcagcttcagaacgagcatccggagctacaggtcgatgtcatttttaacgaccgcgtcatcaatcccgtcaccgagggggtcgatttatcgctgagattaggtgatgtctccgaaggtttttttgtcgcacgcccgcttggcaccgtgcgcagagtgttactcgcctctccggctctgctggcgaaaatgggtcatcctgacacgccggatgcgctgacagattatccatttgctgctgtttccggtgtattcgccagtaatcgcattcaattggtcgcttccgaagatcaactcattaatgttcccgtcaatattcaatttcagtccacgcactggcggagtgtcctctcctggttattagcgggacatgccattggtgttttgcaaagtccggtttgcagaaaagaaattgcagacggcgcgctcatccccctcttaagccactatccgatcccgccatttagtgcctggttgctccatccaccagctgggatgatgtcgtatgaaacgcgaatttgtgcctccctgctggagggctatatcagagatttgttgcttgagccggccggctgaataaaacagcgctgccctggcgcgctgaagatggcctcttgttaatgactcaatctctgatgcatgaaatcaataagcgctcttgtttttgccggcaagtaacgccgatctgaatacagagcgaacaattgcaagggggctgccgattgttcaaattcaatctcgattaaccgcccatcatcaatatagggttggcaggcttgtttcgacaggatggcaaaaccgacacctgagatggccgctcgccctgccatctctccgctgttgacccgataacgaccgttaaccttgatcgtctcgaatccgccctttttattcacaaactgccagggagcgcctttaagcgcattcaccgttgtaatacagggtaactcttcaaattgctgtattcgagaaggcgtgccataacgctggatgacggagggggccgcaacgatggtgcaagggatcgtcaccagatgacgggcgatgtagtcactgtcatccatctgaccacggctaacaatgacagctaaatccagatcatctcgcagggattcataacccgacaaatttgtgacgcaacttatctccagatccggatgctgacaggcgaaatcagcaacaacagagcccagcaatacaggaccgatttcattgggaatacagatacgtaatggccccttgaattgcatttgtcgcaacgttaattcggtttcagtttgctcaagtgcttccagtaatggcttcgcccgggtatagagtagatgcccagcctgtgtgagcttcatatgtcgggtactgcgctcaatgagctgaaggttcagtttgtcttctaactgagaaatgcaacggctcacatttgatgtcggcatttccagggctttcgatgccccgacaaaactgtctctttccaccacagcaatgaagattttcagcgcattaaagtcaagaactgaccgcatcaactatcccacatatgataataatgagtgccatttttaccatctaatcgacaagtttgatagcagttaagctaggatatctttcatccacaggtcgcttgctatgccactggtcaccacaacatttaatcaaaagacgctcattcggattgctatggtaatcgcttttgtgcaatttactaatgcgctggaatatatgatgttcagccctgtttttacatttatggctgcagatttcgctgttcccgtcaccttctcaggctatgtatccggtatgtacacatctggagccgtcctgtcgggaattatcgccttttactggattgatcgttgcaataagaagcattttttaatcgctaatatggtactgctagccatggcgacactgttgacgacattcactaccagttttcctcttcttcttacattgcgcttcttcgcaggactggttggcggtacgacaatggctgtggggatcactattttgataaaccacacaccggctgacttgcgcggaaaaatgttggcgacggtgattgcgtcattttcgatggtcagcatcgtggggatgcccgctgtactatttttgtgtactcattacggttggcatgtcgcgttgtggttaatttgtacactgtgttggttggcattgccactgatcgtctccatcatccctcaggatcccgtcactttcgacacgtcccacgcgctgcccctcgatgtagatactttactgtttgcttccggtaatgcgctggtacagtttagtccaatgctgatcattcctgtcctggcgccattaatgacgcagctgttgggggcttctcaaggtctgctgccctggttgttcttcggcgggggcctggcggggtatctgtctaccagaatgacaggcgcattaacctctcgtgtttctgctttgagtttggcgaccgggtcgaccctcgtttttatcctgagcttactgatacccgtgatgggctatccgcatccagcgctatttattacgttatttctcggcgcagcttacagtcgtctggtgtcatcgtcggcggtgacgattcagtttcctgataacaagcaacgagcgggattctcttcattacagacatccatgatgtatctgatgacaactgccgcatttttcctgtctgcttttttgttacccgaccatcgcatggcgctacaaaatatggatacgctgttggcggtatgtgcaattaccgcatcaggaaccccaattattgtcatcgttttgcaaaagaaactggctaaacgtacgttcgagcccgatcgtttcgccactgagtagtactccacgggttgctcattttttaaggcaaaaacaggggcatacgcccctgcgtgactaccgccgactcatggccagcttcgcggcaaacaacagaaacaggcagcctgtcgttcggtccatccatttcactacggccggttttttcaggatgcctgcggcatagcgagtggcggtaatcagcgttaacgaccacagcgtccctatcaatacatggatagcgaccaggagaaaagtccagctcacgggtgaatgcccggcggggataaactgaggtaaaaacgaaacgtagaaaacacccattttgggattaagcacattccccagcatcccacgcagaaaccagttactggtggtagtggattctgccggagtggtgttaaattgctggcgcgggcgcagaagcaactggatgcccagccagcaaaggtagcccgctccgcaccatttcaacaaggtataagccaactcagaaaccgccagcagcgcccctaagccaaaggccaccacggcgccccaaataaagcatccgagatcaatgcctaacgcggcatgcaaggctttgcgtccaccttcagcggtcgccgtgcgcaggatgagcgcggtatcgagacctggtgtaagagtaagcagtgtggcagcgagggtgtatgcaagaagtgaatcagtgacgagcatttcctgtctccgaaagagacaaggctactgaagggttcacatttttgcaataaaattatttcccctgatcttctgcttaccctgctccattttacttcggggatggcagatgcaaagggtagcccatgactaagtaatgcttagtcatgggctgatgttgttacaggaagagcttaatgttgatttaaaataaccctgggatacgttagctcactttaatatcatccaggtcgatatcctcttcttcgtaatcattatcaacaatcacgtcgcgagggatatcttttttgatgacggcatagaccgtggcggtaacaacgatattcaccagcagggccatgatgcctgccatcggatgtgacatcgtggggatcatcaatactccgccaaaaggaaccgtcgcatccgcaccatagaccatggtgaccgccccgccgcacgcgccgccgatagccgccgccgcgataccgcgcacaatatcattcatgacgatcggaatagaaccctcaacgatattcacaatccccatcggaaccgctgattttaaggtttccacttcttcacggttatagatatttttacgcagcagtttggcaataaagaaagccaggccaaatccgataggcgtagcggtgttaactaactgaagcgcggtaatgggttcatttatcccctgcgcctgcagggtcagcacgaaagcaaagcatgtcttatttagcgggccgccaaagtcaacaatacacaatgcgcctatgactgcgcctaacaccaaattcgacgacgtgcccatgcttctcaggaaagacgtaagcgcttccgtaaagataccgataggcgtaccgatgatatagaccataatcaggcagctgataatggaggcaaaaaagggaacgatcagcgtcggcatcaacccgcgggcccagtcaggcaccttgacgtttttaatgatcgccagcgcaatataccccgcaatatagccaccaatcatcccaccgataaagcctgcgcttatggtattcgccgccagcccgacgacaaatcctggcgcgatgcctggtttgccggcgatcgagccagatattcccacggcaatcaccaccggcaacagcccaagcgccttggcgcccagggtggccatcgcctgccatacatcaaattgtcccggagttaacgtgtcctgcaccgttccgccaagccccatgccgatggcgataataaacccagagccacagacaatggggatcagaaacgagatagcggtcagcagatgtcctttagggtttgctgcttgccatatttgttttagagacataagtcacgccctttaatgtagagtcgccaggccgaaataaaattatgaattgactatttcactgagtttttcaatcaacttattgggggatttgactgccgtttccgtcgcgactttaacgactttcttgccggcaaatctctcctcgcccgttactttgacatcggcagcaagcaggacaatatctgccgcagcaatctcatcagcggttaacgggttctcaatgccgatggttccttgcgtctcgattttaacgttatgtccggcttttttagccgcagtttcaattttcttttgcgcaatataggtatgtgcaatccccaccgtgcaggcggtaacgccgacaatattcataatgtttctccgttaattaatttaataaattacaaatcgatattagcaagttggtattaagcatcggcgttttcagtttctgaattgaaaagcgcaatgattttatgtggatcagattcaacaagtaatttagcgataatgtcttcatccgccagtgacccagacacttgtgccaacaggcgaatatgggtggcattctgatccaccaggcaaaccgcaaataaaataacacagcggacatcgctgccatccatggtctcccaaggaatggcatgttgcgtgcgtccgatggctaatgcggtacgggaaacaccggaagatttaccatgtggaatagcgatatggttttcaaagccggtagagcctagctcctcgcgtaaccagacatcacgaataaagtcttccttattggtgacggcgccatcctggataagtaaatcggtgagttcttctatcacctcttctttggttctggcggtcatatttaacttgatgtttttaacattaagcactgtcgaaatatccatgattcacccgcattcatatagagttgtcgttaaataacaagccagcatcgctggcgtgatgcagatcttttaaggcttattcaaatacacactgtggttcgaagagaaataacccgttatgcagcgacagtttcccgttggaagatctcgatcattctgtcccacgcctggctgacatcctcatggagcgaaaacagacccgatgtgccgacgataaagacatctaccccggattcagcaatctgaccgaaggttttctcattgcaagagccatcaatttccgtcagatagtgatagccattatttttgcgcatgttgatgagctttctaatcttgttcagcgactcaggaataaacttttgtccggcatagccagggtcaaccgacatgaccgtcactttatccagcagatgcgcatattcggcaatgctttctgccggtgtcgccgggttcagcaccaccccgcactttttgcccgcatccttgatctgattcagcaggcggaatattttgttattcgccgtctcgggatgaaagctgatgatatcggcgccggcctcgagacacatgggaatgatatcttccggatgattcaccatcagatgaacatcaatgggcacagtagtaatttttttcagattctcaataaaaaagggagacagtgtgatattgcggacgtaattgccatccattatatcaacatggtaaaaatccgcttttttattcattgccgtgatctgctctttgaactgcgttaaatccatgcacatcagtgacggtgaaaatttagcgctcataaaccacctccgataaatagttagttaaacattgcgatgatatgacccagcacgatgccgacaacgccaaagtctgcgtctccaaaggttgtggagcccagtcccatatcccccatcatgggcaagagaatggcaggcaggaacgaaatgagcagaccgtgagcaaaagcccctaccaccgccccgcgacgtccgccggtaatgttgccgtaaacccccgccgtggccccgcagaaaaagtggggaaccagccccgggacgatgacgctcaagccgaacagcgggcagaggaacatactgaccagccctgcgacaaagcttgcgaggaagccgacgatgacggcattcggagcgaagggaaacaccgtcggacagtccagcgccggcttcgcgtctttaaccagtttgtccgcaatccctttaaacgccgggacgatctcggcaatcaccatccgaaccccggcgaggatgatataaactcctgcagcaaacgtgagggactgaataatggcgaagataataaagttctgaccagcgctcagggtctcctcgacaaaggatttgcccgcaacgagcaccagcaccagaaacagaatcatcatggtgagagagatggccaccgatgagtcgcgaaggaaattgagcgacttaggtactttgatctcttcaatcgagggactacctttaccaataattttgcccaccagcgcggacagcagatagccaatagatccaaaatgcccgagcgccagatcgtcggtgttggttattttacgggtaaacggctgcaagatagccggggagatgaccatcatcgcaccgagaataaccgccccgatggccaccacccatccccctgacaagccccctacagacaggataaccgccagcatcgcagccatataaagcgtatgatgtccggtcagaaagatgtactttaatggcgttagacgcgccagggcgatattgatcagcatgcccaataccataatggtggcggtttccgtgccgtaattcttctgcgccagagcggccatggcatcagtgttgggcaccacgccctgaatatggaaagaatgttcaaataactggctaaagatggttaacgtataggctataataccggcgccggcggtcaatatgacaaaacccatgatggttttcagcgtgcctgaaataacgtctgaaattccttttttttgcaacagcagaccgatcagtgaaaataaaccaaccagtatcgccggtgttcctagcacatcataaataagaaaatgaagcatgtttaactccacgaatcagatagccgttgcttaaatgttttctgctaaaatttctttaattttattgttatcaagtaaattacttaatccaacgacctttgcagagtgactgctaagatgttctgcaatgtctttggcgctgagaataagatcggcagtttcgctttttgccgacgtcaggtcggtatgtgcgacttcagcttctttattcatttcggcaaggatctttttgacattcatttcaacgatgaagctgctgcccaaaccattaccgcacacgataagcacttttttcattctgttttccttcagtcaataacggcctgaatcgccttgctatcatcggcatttaacaatcggtgtaacttttgctgatcgctaaagatttcagccagttcaccaatcatcgtgatatgttcatttccggaacgagcgcatagtatgattaccacgtttaccggatcgttctctgtcgagccgaacgacaccccttctttaatatgaagaagcgataatccatttcttaacaccccctgttcaggacgggcatgaggcatcgccaagccgggagctaatacgtaatagggcccaagttctttatggctttgcaaaatcgcctcaatatacgacccggctatatacccttgcatcagcaagggttctgctgcaagtcgaacggcattttcccagctatctattgagttaatgactttaattttatccggggttaaccagtctctgatcatatgctctcccgagggggtctatgtgctgcactataaacagctaaataaaatgcaactgtgatacacctcccaaagttagcgctaacaaagaaaaatgttaaaaagtgcgttaccgctaacactggctataatgtgctttccccctcgctgtggtaagttataatgcgattcgcagatatactttcgttatattttatttttcaaacggttggtgattttggtgaagagtttagacgcggacggtagcccgaaagaaaaacgacgtaaaggaacgggtaagataaccctgaccgaggtggctgagtttgtcggtgtgagcgccatgaccgtctcgcgagcgctgagaatgcctgaaaaagtgaatcctgagcttcgcgatcgcatcgatgcggccgtcagtcaactcggctatgtccctaatctgcaggcacgtaatctggcgtcggtccattccgatcttattctcgccgtcgttcccaccttctcttcgccgggttttttgccggtctctgaagcgctgcaaaaagtgctgaccgaacgcggatataccatgatgtttatggaatccgggcatgacggtcaaagtgaacaaaagacgtttgaaaaaatgctcgcctataacccggcggccattattcagttcaatatcgataccattgagagctgcacccagctgctggccaacgtggatgttcctattctggaaattggcgcgctaaatacccaccctgtgggtatgtgcatcggcgtggattacggtaaggccgtaaaacagatcgtgactcatctggccgacgcctcattaaaaaacatcgcactgctctgtaccccggctaataacacaatgtttcgccagttgctgagcggttggaatacggcgatgctcgctctgaaccgctccccgcaccgggtggtaaccactcatttgccatccaccatcgccacaggcgtcaatatattcaaggatatgatgattacctggggcgatctggatgcgttaatttgcacgtcggatgaaatggcctgtggatgtatgatggcctgccacagtgccggcattaaggtgcccaataccgtagccattgcgagtttaggcggaggagtgttatcgacagtctgttcccctgccctgacaaccgttgagtttccctggcatgacattggggtgaaagccggtaaagctcttctcgaactgcttaacgataagcctggtgaaaagttcattgaaattccgtcagtgctcaaagtccgggccagtaccgcggcatgagtttaatatagggcgataaggcttcccctatctagtatctgtgtgtggtagccagggtttctaccaggaagaatgtctctctgcgagagtccatacaataaatgcccagctcataaagcaaaaaatagtcgggacagtagcgttttttcgctactaagcgggtaaaccgccagcctcatttcccgtttatcttgccagccgccccaggcggtgatttcgtagcctcgacccgcctgggcggctttgcactgaagtccgtctagcgccagtccaggatatacgatgtctcctacgccagttagcaggtaaagcgcaccgcgataattcatttgcaccgccctggtgccgcacattcaccatgccgccccccgtcagacatgccctcattacattaaccagttgaatataaaaaattattttatatggcacgtttaatgctcttcgcttgtataccgcaatgtggacaagaacgtatgccatatggccacaacaggtcgccagtctgcggtcgcaaccttcccctttctgtgaggcatccagggtggatgcgtttcacggaagcctgcttactgaaaacggagaacaacatgacgacactcagcgaaccgttggttaccccgaaatatggcaagtggcgccagctggtgctgggcctgatctgtatggccgccatctccagtccgcaatatgtctggacgctgttgacaaaacccttggccgccaaacttggcgtcggtctgccagaattgcaggtcaccttctcgctgctgatcatcctgcagaccttcttttccccttttcaggggcggttagtggaaaaatttggcccacggcggctgatcgctattggcacagtgatggcgggaatgagctgggtgctttccgcgcaggtgaatggcctggcaacgctctggctggtttatggctgcatgggcggcctcgggaccgggatcgtctacatcggtgttgtcggcctgatggtcaaatggttcccacagcagcggggatttgccgccggcgcggtggcggcgggctacgggatgggggccatcataaccaccttccccatctccctgtcgctgaccactaacggccttgaacatacgatgacgactttcgggatccttttcgccctcgtcggcttcctcgccagtcaggggctgaatctgccgccgcccgctgtctcccagcccgtcagtcagacggtggcgcagagcagcagatcgtttacttcccgggaaatgctgcgccagccgctgttctggctgatgttcgtcatgatggcgatgatgtcgacttccgggctgatggtcacttcgcagatggcggtgttcgccgaggatttcggcattagccaggcggtggtgtttggcatggcggcgctgccgctggcgttaacgatagaccgctttaccaacggcttaacccggccgctgtttgggtttatttccgaccgcttcggccgcgagcaaaccatgtttatcgcctttgcgctggagggggtagcgatgatgctctggctggcgtgccgggaagatccgctgctgtttgtcctgctctccggggtggtgttctttggctggggggagatcttctcgctcttcccgtcgacgctcaccgatacgttcggcagcgaacatgccgccagcaactatggctggctgtatatttcgcagggcatcgggtcaatctttggcggtccgctggcggcactgctctatcagtacactcacggctggcatgtggtcttcagctgcgcgattggccttgattttgtcaccgccgccctcgcgctgtgggtgctaaaaccgtggcgcgcgcgctttatccgccagcatagctaatcgtccgccgggcagaagtgacggctcgcccgtcacttcactgatattcgctacgcaacagcgcgtacaggtactcatcgccccactcgcctttaaaaaagatattctgccggtaatgcgcctcgcgacgaaagcccagcccttccaggagtttgatcgcgccggtattgcgggtgtctaccaccgctgtcagccggtggtgggctaactgttcaaagagtaaggccatcaccgcccgcatcgcttcccgggcatacccctgatgctgatacgtcggggaaaaggtcatccccagttcagcctgtctgccttgatcgaaaaagtggatccccacatctcccgccagcgcaccgttggcctggatctctacggcaagctggaaccaactctcatcctcagcaaagcccagcgaacgctgttgttcatagaaggctgtcgcctctgtcatgccgtagtgggtccagctctgaaagcgggccacctccggcagattgcgataatggctgaaagacggcagatcttccgttctgaaccggcgcagcagcagccggggcgtggtcaggggtaatttcatctcttctcttcttctcaatgagacaggcaatggcggggccatcttaacctgcgcagcctcaacccagtcatcgcacttccttgtcaatttaatataaagttaaatttcgatattaaaatttcacaaaccgataaaacattacaataacaaatacgaaaaacaggggaacaagccagagaggcgtctctggaaaaaagagcccttgcgccacggcgaagaggatggtcagtacagctgggccataatatgaaattaacgacctgaatattcttcgcagcaatcttttaataagattcatcatagttatcggatcatcctggtaatgatgtctgtaataccctcattcgatgcctgtcctgctgtaaccgtctcagacttcagaaataatgcctatcagaaagtacatcattcacagcttatgtgtataaaggtccgaataatacgccggttcagaaacataaggacatgacttgtgtatgtctacgcaatcttgtttttattgagggaaccgactccgcataaaccgcggctgatttactttttgcccgtctggcggcaagatccggcataatgcaccgctgtcgcaggacggccgtgtcaccggcaatcgtgacagcgaaccattcgacaggaaaacgcatgaagccaaaacaagcggacattctccgccacgccagcacgctgtttaatcgcgaaggatatcagtcgcccagcatcgagcggattgctgaacatgctggcatctccaaaatgaccttctaccgctattacgccgataaagaggcgctcattctggctatcctcaagcagaaagagagcgaatttatgcaggatttggcgcagatcaccgcggataaagccagcgcgcgggaaaagctgttcgccgtgttcgactactaccatcgctggtttacctgcgaaacgttccacggctgcatgtttacccgcgcgctgtttgaatatggcgcgtcatcgccggcgatccgggagcaatgctcccgatttaagtcgctcctctggcagttcttccgcgatatcctcctgcaggtgttaaaaccagagcctgccgagcgggtcgccatgatgatggtgatgctcatcgatggcgctatcgccgcccagcaggccgagtccgccgaatgccgggagatcccgccagggatgaccgcctggagcgcggccaaagcgcttatttactcagaaggcggtacgctgtgagatgataagctgccgcccagcgactgcagggccgccagcagaccatcatagtaatcgttgcaggtttgcagacgcagcgcggcgccaaagaagacctcctccatcgccgccggatgttttttgccaatcggcacaatcacattgttcagccagccgtccgcatgaccgatgtcgaccgtgatatgttcggcatagtaatgcacgtcgcgctcggaaagcccaatccgccgacagcccgccaccagtttttcatactgcggcgggtcgagcagctcggtcatcgccatgacccccagcgatttgtaataatgctgacggttaacgccgcccagcataaaggcgttatacccggccagcccctgccactcgtacaaatgggcaaaatgattgtccggcaaagcgatattccgccgcttcagtaaatccttatacagattaacgtgggtgatctcggtgctgccctggcctatctcatcccacagattttgcgcaatctcagcgcgggtttccggcagcgagcccaccagccccatcgccaccagatcgaagaaaagcagattgagggcgctgtcgcttttgaagaaatagtcgatttgcgccgcagaggcctcgctggcaaggaaatcgaacagcggatgatgagacgccgggtgctgctggcataaggcgcgcagttcgtcgacgatattgccggcgttaagcattggtctctggtggtggaagcgtttgctttccgcccgcagccactcagactcgatgtaatttctgatcccggaaagcagcggatgaaactgattggcagccgctggcgagagcgggtcggcaagccaggactgataaagaatgaacagcgcgtggtgcgcacgctttttggcctgtggatcgtcagcggagaaggcgcggatgcaggtattctcagtgagatgccaggctctgtcggccaccagcgggttggccgtcagcttcagcgacagcgcgttgctgtgcagaagctggtcaattaactcatccagcgccagcctggtcatcaccgcggtctggtcgcttccaatcaccccattatctgtgttacgcatgatttatccctgtgaaatacatggctactatacggtatagtaccgtccataatgcggcaacgtatatttcacacgcattttcaatttattgtttattaaaaagtttaaatgagtacaacaaaaaccactaaaatattattgatattataaaaacaataacattaccattcagtacagtgacaaacgacacaaggaatcatcatgccttatctgttactgacgctggcggctctgttctggggcgggaattatgttgtcgggcacgtgctggtgcagggcgtggatccgatcctgatgaccgaagcgcgctgggcgctgacggcgctgctgctgggcctgctctaccgacggcaaatcgccggcagtcgccgcctgctgcgggcaaacgcgccagcggtggtggtgctaaccctctgcggccaggtcagtttcccgctcacgctctatattggcctgcaaaccacctccgcgctcaacgccgccatctatatgtccgccacgccaagtatggtgctgttgattaaccgactgtttttccgcgatccggtatcagggcgtaactggcttggagtggcttttagcaccctcggcgtgatgatcctcttatttcagggaaatccgctgcacgccgcctctctgcacacctttgccatcggcgacctgtgggcgatggggtcggcgctgagctgggcgctctactgttcgctgttacgtctgaaggaccgccgaatcccggcgaatggctttgtcgccgtcagctcgctgctcggcgccctgatcctggtgccaatcgtcatcttctggctgatgcgccacccggcgcaggactgggcagcctggcgcgagccgtttttcctcagcggcctggcgtatctggtaattttcccatcgtggctggcatacctgttctggaacaaaggtatcgccaccattggcgccacgcggggcgaaatttacacccacatcatccccctctccggcggggtgttgagcatcctgttcctgcatacccagccgcatgcctggcatctgtttagcgcgctgttcatcatggtggggattgggatctgctcgctggagaaacgccaggcggcgtctattcgtctgcgtgactaatgtatgcgaccgggcgcctggccacgcccggtcacaaaagttaacggctggtggagagcggctggtgatgtcccgctcctgcggattggatcacccggccttcgcgaccaaaaaaggtcaggacggtaatgacaatcgccaccgtcccggccaccagggccattgccaggccgtagttatgcccatgatgctgggcgattgatgcctggagagtggcattcaccgaagccagcaaattacccagctggtagacgaagccgggcagcaccgcccgggtgttggccgggaccagttcattgagccaggtggggatcaccccccaggccccctggaccataaactgcatcaggaacgcccccgcccccagcgccagcgagccgctggcgaaagcccacagtggaatgaccggcagcgccagcatggcggcgatcataatcgctttgcgtcggccaatcttctccgacagcgaaccgaagaacactccaccaatgatcgaggcgatgttatagcagaccgcgatgatgctgaccgttttaggctcgaagccgtgctgaactttcaaaaagaccgggtaaagatcctgcgtcccgtgagagaagaagttgaaagccgccatcagcaccaccaggtacaggcacagcttccagtggctacgcagtaccggcagcagggccgtactctctttattctgcctggccgcctgccaaaccggagactcctcgacgcagaaatagataaacggcagcagaagcaccggcgcggcgccaatgacaaacatcccgcgccagccgagttgttcaaacagcagcccgtaggcgacggccgccagcaaatagccgaaggggtatcccgcctggaacaggccggacatcaggccgcgcgagcggtcggggatcgtctccatcgccagcgaagaggccacgccccagatcccgcccatcgccacgccgtacagcacccgcagcaggaaaaacagcatcaacgacggcgcggcggcggagagcagctcaaaagccgagaagaacacaatgttgagcatcaggattggtttgcgaccaaacttctccgccgccctgccgaaaattagcgcgccgacgggccgcacggccagagtcagcagaatcgccagagtgacctcctcaaggtcgacatgaaacgagtgggcgatatcgctcagtaaaaaaactaacaggaaaaagtcgaaagcatcgagcgtccagcttaaaaaactggctatcgccgcattacgctgtcgtgaggtccagccgtgcatcttgtcatccctatcccgacggcattgccgggagtgtgcgcggcgtccagcagagcgagctggggtcgccgcttgtgtaaattgtttgtatagaaagttgctcttttgttaattacaccccttttacgacaatcggcaagtttattagcatgctaatttgtttcaaattgcgtgttcccctcaccggttcggtaattttcgaccagaattaaaaccaggttcgcttaagcgaagcgtcatcaatgccgcatctgcccacaggaagggagagaatcatgaagagaattgccatcgtcggcgtggggccgacggggatttacaccttttatgaactggtgaagcgcggtgagccgctggccatcaccttgtttgaaaaagaggcgcaggccggggtgggtatgccatacagtgacgataataccgcggcgcaaatgctggccaatattgccagcattgagatcccccccatcgacctgacctacctgcaatggctgcagcagcaaagcgatgactggctgtcagcgcgcgggcttgaacggcacgccctgcatgagcgccagtttctgccgcgggtgatcctcggcgaatactatcgcgaccgttttctgtacctcgttgagcgggcccgggacgtcggctttgtgattagcgtttgtgaatcctgtgaagtcacggatattgcggttcagcccaccgggatcgccatccacaccgatagtgcagcagacccggtaattgtcgacctggtggcgattgccaccggccatctgtggcctgaagaagagcgcgccagccgacagtacttccccagcccgtggaccggcctgatggaggcccgcattgccccctgtcgggtggggatccttgggacttcattaagcgcgattgatgccgccgtggcggtagtggcccgccacggcgttttccataccgaggacgacaaaacgacccatttttccctccatccaggcagcgaagcgctggagatcaccctgatgtcacgccacggcgtgctgccggaggccgatttttactgcccgatcccgtgggagccgctggagattgccactcccgccgccctcgaagcggccattgcggagggtagcgacgctctgttaaatcggatttttgagctgatcgttaaagagctggaatatgctgcccccaactggagcgaggcgatcgggcttcgtcagctgacgcctgacagtatcgccgacgcctggtttgccgaccgcctcacccatgacccctttcagtgggcgcagcgcaatctgcaggaggtggagcgcaataagcgcgaacaccacacggtgccctggcgctatgccattctgcgcctgcatgaggcgattgaaaccgtggtgccgcagttcaacgacgcggacagccgtcgcttccgccagggcctcgcccgggtatttatcgataactacgccgccattccgccggagtccatacgtcggctgctggccctgcaccgggctggcattctgcggatcctgacgctgggcgaagattatgagctgcagcgggagcctgaccggacgctgattgttcatcatcgtcagcgctgcgaattcgatgtctttatcgatgcccgcggacaaaaagcgctgaaaacccgggatctgcccttcccttcactgcgccagcagctgctggcctgcggcgacgacattccggacgttggtgatgactacacgctgcaggcgccggagacagtgcgcggtcgggtcgccttcggcgcccttccctggctgatgcacgatcgcccctttgtgcaggggctgacggccagcgccgagattggcagcgcaatggcccgcgccgtgtcgcagcaggccgccggccgacggcgccgtctctggtatatcgaatagcggagcgcttaagcgcaatatccgaatactgggggggtgaacaggcgtgctataaacagcaactgtccgtcccctgcacgaccacgtttaacatttacgaggtattcatgagtcatctttttagcgcgacgcgaattggtcaactcacccttgataaccgtatcgttatcgccccgatgtgtcagtactccgccgacgagggtaaggcgacctcctggcaccggatccatcttggccaactggctttctccggcgccggcctgttaattctggaagccacagcggtagagcctgcggggcgtatctccccgggggatctggggctgtgggatgatgaaaccgaaaacgccctgcgcggcgtagtcgaagatattcgggcctggtcgccgatccgtctggggatccaactgggtcatgccggacgcaaagcatcctgcgccgccccctggcagggaggccatcagctggcgctcaacgatggtggctggcagaccgtcgccccttccgccgtggcgtttcacgatggcgatcgcgcccccgctgaactgagccatgccgatctggcgcgcatcaaagcggccttcgtcgccagcgcgctgcgcgcccagcggctgggctttgagctgattgaactgcacgccgcccacggctatctgctgcaccagtttctctcgccgctcagcaaccagcgccgcgacgagtacggcggttcgctggagaaccgaatgcgctatccgctggaagtctttaaggcgatccgcgaggcagtgggcaacaccatggcggtgggcgtcaggctgtcggctaccgactgggtcgaaggcggctgggactgcgagcagtccattaagtttagccagcagctggaaacgctgggcagtgactatattcacgtctccagcggcggtttgtcgccgcagcaggcgatcaccgttgggccgggataccagttgcctttcgcccgcgatattcgccagcaggtagccatcccggtgattggcgtggggctgatcaccgacccgcagcaggcggaagcggcgctggagaatggcgatgccgacctgatcgccctcgcccgcgcggtactctacgatccgcactggccgtggcacgctgcggccagccttggcgcccaggtccgtgtgccgtcgcagtatttgcgctcggagccgcacggcctgaaaggcaccctgctgccaaaccgttgaacccacggcgggcataaaaaaggggtatcgtaagatacccctgagcaggatgttattgcggtccatgtgccgggcggcggcgacgccttgcccggcctacaaaagggtgatacccggtcattgcgcagccaacgcgctcctgcgtaggcagcgcaagcgcagcgccgccgggcaatctatcaggctccgctccctatatttccgggcggcgggtcaggcaaacaccgcgagttactgctgtgcggcaggcggcgcggcgttctgtttatccttcgcgatactgtcctggatggctttggttttgctcgccgcttcagccgagagctgattggcgtcaccgatggcgttgtctttgatctgacccgcctctttgactatgcggtcactttcctgctttgcgttctgcttcaccgcatcggcctgggctttcgcctgctgggcgatggcgtccgccttcttgtccgcctcggccttgatggcgctggcctgatccttcaggcgatcggcctcggcgtcagcctggcttttcagcgtatcgatttgtttatccgcatcctgtttaattgcctgcgctttatccgccgcggcatccttcatctgctccgcattatctttagccttatccagtttgttatcaactttcgacgcatcgtcgcagccaaacagggtcaggcacagggcggaagcgagtagtgttttattccagagtttcatcagcattcccttacaggttaagtcgttatccagctttgtgattcgttgcattaatagcattcacattttatatataaacgctcagccgatagagtcaaggcgacagcgccgattgtcagtccagggtcgccaccagcccctgcagccagtcggcaaagacccgaaccttatgcgagagatgccggtgcggatagagcagcgacaacggtcgacgcggcgccggaaagtccggcaaaacttccaccagttgcccgctgtcgatataaggttgcaaaaagaaacgcatcccctgcagcatccccagccccgccagcccggcagcagtaaagacttcagagttgtccagcaccagtttaccgggaatggcgatctgcctgatgccctccggggtctggaatcgccagggcataatctgccggctgctgctgttcacccagttcaccgccagatgcgactgcaggtcctccagcgtcgcgggcgccccatagcgcgccagatagcccggactggcgcaggtggttaatgccacctcccccagtgaacgcgccacatagtcgccatcctcaagatcccccacccgcagcaggcaatccagaccatcgcgcagcatatcccggcgtacgtcggagctgctgaggacaatctccacctccggatgggcctgataaaaatccggcagatgcgggatcaccagcagccgggcaaaggcgatcggcatatcaacgcgcagctgaccgcggatcggccggtccggcgcgaacgactccagcagatcgtcggcctgggagagcaacggtttgctgcgacgataaaactcttccccctccggcgtaagatacagacgccgggtggtgcgctgcagcagccggaccccgctctcctgctccagctgctgcagtgctttggtcaccgccggtcggtggatctgcaaattttccgccgcctgggcaaagctgccggcatcgacgatttcaataaaaattttaatattttcaaacagattcatttgcatgatggcccgcctcccacctcttcatcagttcacattattactaatttaataatagtgatgaaagtttttgctcattttttaaaacaataaagacgcctacactgccctcattgccgcatcgctggggcgaacaaatttataacttattaacatacaaggaaaaatagcatgcaacctaaccgcgtcgcccgcattctgggtattgaaaaaccggtggtccaggggcccctctcctggctaaccgatgctcgtctggtggcggccgtcggcaacgccggtgggcttggcgtgctgggcccgaacgccggactgacggcggcaaccgccgtctccaccccggaggccaccgccgagaaaatgcgcgaagagatccgcaaaaccaaacagctgacggagaaaccctttggcgtcaacctgatcccgacggcggaaaatgacatctggacgccggcgatcctcccggtgatcaaagaggaaggggttaaggtggtggtctacaccggctacggcgacggttcgttaaaaccggcgctgttcgacgaactgaaagccgccgggatcaccattatctatcgtgacatcaacccgacgccggagaacagccgccgcgcggagcaggccggagcggatattattgtcgccaccggctttgacgaaggcggcacgctgccgggtaccgccctcgggaccttcaccatcgtcccgctgatcgttgacgcggtacagcgggttccggtgatggccgccggagggatcaccgacgcccggggcgcgcgcgccgttcatgccctgggggcggagggcgtcttcgccggttcggtatttatcagcaccatcgaaagccgggttcccgactcggtgaaagcgaaaattgtggccgccaacggtctggatctgcgcctgttccgtaccctgccggactactaccgcgcgctgcccggcaaactgagcgacacactggtagccatggaccgggccggcgcctcaaaagccgagctggcccaggcgatgggcggtctgcgcgggatgcggctgggcatgctggaggggaataccgatgagggatatatctcggtgggcgcggggatcggcaacatccatgccatcacctccgtcgccgaggtagtcaaccagctggcggtgtaaagccgccagccggggcacggtgaccggcgcgatcaggcgtcggccaccttctctaccgcccgggagaaagcgtcgatagccagcccgacgtcggcggcggtcaccgactccgccgggtgatggctgacgccccccaggcaacgcacaaacagcatcgccgatggccagcgctcggcgatggcgatagcatcatgccctgcgccgctcggcagcgtcagggaacgcccctgcaccgccgccaccgcctcgctcagcaccgcctgcaggtgactgtcgcaggcggtggcggcgatgcgataatactcctcggcggcgaaactcagctggcggcgcccggcaatggcctgcgcctgccccagtagctcatccagcagcgccgtcagcggcgcatcctgcgggccgcgaatatccagcgtcagctgcacctcgcccggtatcacgtttaccgcgcccggcgcacagcgcagggtgccgaccgtcgccaccaggttaccgccgcgctggcgggtcaggttttccacctgcaccatccattccgccgccgcggcgagagcgtccttgcgatgaagcatcggcaccgtgccggcatggccagcttcgccggtaaaacggcagttcagccgtctggcgccgttaatcgcctccaccacgccgagcgccagccccgcctgctccaggcacggcccctgctcgatatgcagttccagataggcggcgatatcccgcgggtgacgggccgcgtgggcgatccgcgccggatcgagtccggcattcaccagcgcctgggcgacgctcactccatcagcatcgcactgtgacagccagctttcaggccaggtgccggtgacgccgcgactgccgagcagggtgatgccaaagcgggtgccctcttcatcgccaaagccgacgatctcgattgccttcgccagccgtcgcccctgctggtgcagacgctggaccacctcaatcgccgccagcacgccgagcatgccgtcgtagcgtccggcgttgcgcacggtgtcaagatgagagcccagcagcaacgccggcgccccctcctgttgtccttcataacgtccgcagatgttgccgacgctgtcctgccacaccatcatgccggcagcctgcatccactgccccaccagctggttggcctgcagatgctcgggcgacagatagacccgggtcagggcatcggcggtttcgctgagggcggccagccgatcggcacgcgccatcacccggctggcggccgcctctctctccgcctgctggcggacggtgtcactcatagggtggcctcggtgcggtagtgatcccaggccgcctgcatcgccgcgccctgagtggtggtgaacctgaggtagttcaggaccgcttccagcgcgctgagcgtctgcatcacgcagtctttacgcgcgttataacccatggtgccaatgcgccagactttaccgtgcagcggaccaaacgaggtgccaatttcaatgccgaaatcttccagcatcagtttgcgtacctgatcgccgttgaccccgttggggatcaccacccccagcacgttattcattttgtgccgcaggtcgccaaaggtctcgagccccatcgcctggatgcccttcagcagcgcatcgccgtgcagtttgtggcgggcgatgccgttgtcgagtccctcctggaggatcaggcgcgcgcactcccgggcggcgaacagcgccgaggtcgcttcggtatggtggttaaggcgctccggcccccagtaatccatcaccatgccgagatcgaaatagttggagtagatcatctcgtcgacgccatcgtgatgggcatcggtgcggatcccctgctcaatgcagcggcggcggcggatgacctcttccatccgcgggctgagggtgatgggcgaggtgccggaaggaccgcccaggcacttctgcatcccggcggacaccgcgtccagctgccaggcgtcggtttccagcgggttaccgccgagcgacgcggtggcgtcggtatagaacagcacatcgtgacgacggcaaatctcccccagctccgccagcggctgcagcatggtggtggaggtatcgccctgcacggtgagcagcaggcgcggccgcacgcgcttgatcgcatcctcaacctgatccggcgtaaagacctcaccccacggcacctcgatggtgtgcacttctgcccggcagcgacgcgcgatctcgcacagcagatgaccaaaccggccgaacaccggcaccagcaccttgtcaccgggacggatcgccgacagcagaatcgcttcgatcccggcgcgcgaggtgccgtcgaccaacatcgtccagcgattttcggtgcgaaacacgccgcggtagagcgccatgacttcattcatgtagtgggtcatcgccggatcgtactggccaaccagctggctcgacatggcgcgcagcacgcgcgggtcggcattgatcggccccggccccatcagcaggcgctgcggcgggttaatttgcgaaaactgagtgatatccatctgccattccttacgttagttaagaccgcgcaccgaggagataaactgtttcagttcgctggtctgcgggctggcgaacagcgttttgctgtcgccctgctcccagacgcgtccctgatgcataaacaccacgcggtcgcccacttcgcgggcaaaattcatttcatgggtgacgaggatcagcgtcataccttccgccgccagttgctccagcaccttcagcacttcacccaccagttccgggtcgagcgccgaggtgatttcgtcacagagtaaaactttcggcgacatggccagcgcccgggcaatggccacgcgctgctgttggccgccggagaggttggccgggtagtaatccagacggtcgccgagcccgaccttctccagcatccgctgcgccagctcccggcattcggcctgggacttcttcagtacccgccgcggagccagcatgacgttctccagcgccgtcatgtgcgggaacaggttaaagttctggaacaccatgccgatggagcggctgatctcccgggcctgtgaatcgcggttggtgatggtcatgcccccgagcttgatgcttccctcctggtagccctccagaccattgatacagcgcagcagggtgcttttacccgagccgctgcggccgatgatcgagatcacttcccccatgtcgatatccagatcgacgcccttcagcacatggttgtcgccgtagtacttctgcatctgattaatggtgatgagaggcattgaatttgttctccagatagcggctgtagcgggacagcggatagcacagaatgaaatagcccagcgccacaagggcaaacactttaaacggctgataagtgacgttggtcagcatcgtccctgccttggtcagctccacaaagccgataatcgatgccagcgccgtgcctttgatcacctgtactgcgaacccgacggtcggcgcgatggcaatgcgcagagcctgcggcgccaccacccggtacagggtctggccgaagctcagcccgagacagcgcgaggcttcccactggcctttcggcagcgcgcgaatgctgccgaaccagatatccagcagaaaggcgctggtgtagagcgtcagggcgaccgaggcggcggtccacgccgagacgtcgacgccgaacagcgccacgccaaagaatgccagaaacagctgcatcagcagcggcgtgccctggaacagctcaatatacccgcggatcagccgtttcacctggcgtccgccggtgagacgcagcagcagtaacggtaaggtcaccagcgccccgccggtgaacgcgaccagcgacagcagcaccgtccagcgaccggccagcagcaggttgcggataatgtcccagtcagtaaaagtggtcatcaggcctgtacccccagccatttacgccccgccgccatcagcagctggcgcatcgctatcgataacgctaagtagatcccggtggtcaccagatagacctcaaagctcaaaaatgtccgcgactggatcaggttggcggcgaaggtcagctcctcataggagacctgcgacaccactgacgagccgagcatcacaatgatgcactggctgaccagcgccggataaatccgctgcagcgccgggggcagtacgacgcgaacgaaggtttgcgtccggctaagcccgagcacgcgaccggcttcccactggcccttcggcgtcacctggatgccggcgcggacgatctcggtgctataggcgccgaggttgaccaccatcgccagcagcgccgcttcaccggcggtcatcttcagtccaaggttcggtaaaccaaagacgataaaaaagagctgcaccacaaacggcgtgttgcggatgatttccacatatccgccccatacccggctgagcattcccgggcgcccgctgcggatcgccgccccgaggatgccgatcgccagtccgccgatcgtcgccagcaccgtcaactgcaccgtcacccacaggccggccagcagctccggccagtgcggccagagctcagagaaatgaagttgctccgtcatccccagaccttacgcgccgaggctggcaggcagtggcgctttcagccacttctcagacagaccgttgagggtgccgtccttaatgccctgctcgatgagggtatccacttttgccttcagcgccggttcgttctttttcagaccgataaagcacggcgagtccttcagcataaagctcgggaccggcgctttgtcggcgttctgccgggagatggccgccaccaccagattgccggtcgcgacatactgcacctgaccggacaggtaagccgacagcgtagtgttattatcctcgtagcgcttaatctgcgccgcctgcggcgccacgctggtcagcaccatatcttccactgccccgcgggtcacgccgatgcttttgccgctcagcgcggccgcgtccttcaattccgcccctttcgggccaaacacgccgaggaagaacggcgcgtaggcgcggctgaagtcgatcaccttctcgcgctcggcgttcttgccgaggctggagatcaccaggtccaccttatcggtctgcagatacggcacgcggttggcgctggtcaccgggaccagctgcagcttgagcttcatcgatttcgccagatagcgcgccatatcgatgtcatacccctgcggctgcaggtcggtgcccaccgagccgaacggcggaaagtcctggggtacggcaatgcggatgacgccgcgtttttcaatatcctggagctggtcagcctgcgcggcagaaacagacgataggagacaagcggccccggccagcgcgatcaacagtttcttcatgatgtttacccgttacgttagcatgaaacaaaagattctttgaatctgtttttgcaactaatgttccagatacagacgaggcgagggttggcgaggaattaaaacaaaaagtgagaaaggacaagcgttaacggaaaagtgttcagagagcggcggcgccatgacgtggtttttattgcaccataataatgcacagcaccacgctggcgccccatcagcgttgttccagctcgtccagctgctggtaaagcgtggcgatatcgtggatgcgcggacgaccgctgtcgagcgtttcatggagaaaggcattggccagcagattaatcaggctgttgaccgaggcatagctatcgtaggcggagacgctgtccagcggcgcgcagagctgccagcgggagagcggaaacaggctatgggcctgcggctcgcacattaacaggaccggcaccccgtcgcgttgcagctgctgcagcagcgggcgtactattcgcggccggcggcgaaacgccatcattaccaccagatcatcggcggtcagatcgaccagctcttcgctgagactctgacccggctggggcagcaccagcacctggccgcgggcctgcagcagctgctgacgcaggtgcagcgccgccggataggcgttgcgcatgccaatcaccacaatgcggcgggcggccaccatcgccgtcagcgcctcagcgaactggcgggcgtcgagggcgttgacccactgggtgaggtttgccatctcctgcttataatggcgcgccagcagcgtgttaccctgcaccgcgtcgcgctggtcggtgagcggcatcccgctctgacgcagagtgcgcagttcatcgcgcatatccttatatttgtcgtaaccgaggcgcttaaacagccggctgacggtggctttcgacacgccgctcagctgcgccagctcggcgctgttgtagcttatcaggtcgtcaaagtggtcaaagatgaaatccgccacccgctgctcctgcggcgacagcgaggcgtattgccctttcagtcgttcatcgagttgttgcatagcgcccctgtaactttcgtttcatcatctattcctcatcatactgtatctgctatgccttacacatagcgtgccagtgggaaaattctggtcatcgtttttatcaatgaaacgaaacgttcagagatggaacagcttttgcagtgttctgcgggtgattcgttcagaaaggataatttatgcacagtagcaacgtttcgacccacggcatggcggtggccccccaccacctcgccagtcagagcgcgctggcgatcctgcgcgagggcggcagcgccattgaagcgatggtggctgccgcggcggccatcgccgtcgtctatccccatatgaatggcctcggcggcgatggcttctggctgatcgtgccgcctgagggagacccaatcgccattgacgccagcggggccgccggatcgctggcgaccctcgaggcctacgccggacagcggcatattcccaaccggggaccgcaggccgcgctgaccgtcgccggcaccgtcagcggctgggtcgaggcgctgcgtatttcacgggacttaaccggccgcgcgctgccggtggcccgcctgctggccgatgcgatcggctatgccgaagacggcattccggtcactgcctcgcaggcccacgccaccgccagcaaactggaagagctgcgccatcagccgggcttcagcgaaacctggctggtagcgggcgaggccccgcggcccggcagccgcttccgccagcccgccctcgccggtaccctgcgcatgctggccagcgacggtctcgacagcttttatcgcgggccgctggccgagcgtctcgcgcagggtatggccgcgctggggatgccgatcaccctcggcgacctgcaggcccaccgcgcccggcgtccggggccgctgacgctccagcaccagcagggcacgctgtggaatcttgccccacccacgcaggggctggtgtcgctggcgatccttggcatcaccgaccgtctgaagatggccgatgccgacgacgcgcaaacggtgcaccgtatcgtcgaagccaccaagcgggcatttgccctgcgcgatgcgcatatcaccgatccgcgccatctggatgtggatgtacagcagttgctcaccccggaagccctgcagccgctggccgacagcatcgacgacgccagcgcttccccctggggcggcggcaaaggcccgggcgataccgtctggatgggcgtcgtggataacagcggactggcagtgtcgtttattcagagtatctatcacgagttcggcagcggcgtggtactcccggacaccgggatcgtctggcaaaaccgcggggcggccttcagcctcgatccgcagcatctcctggcgctggcccctggcaaacagccattccataccctcaaccctgccgccgcccgcctgaacgatggccgggtgatggtctatggctcgatgggcggcgacggtcagccgcaaacgcaggcggcgctgtttactcgctatatcctgcagggggtaccgttgcaggagagcatctcccgtccgcgctggcttctgggccgcacctggggccagtcctccgactcactgaagctggagggacgctttgcccccgcctgtatcgcgcgcctgcgcgagctggggcacgacgtagaagtgctggccgatttcagcgaagcgatgggccacgccggggccattgtccgccatcccaacggtctgcttgaaggggcgaccgatccacgcagcaacggcgccgccgccgggtactaaggagcagaccatgaccacacagccagactggagcgagtatctgacgcagatgactcacctgttggatatggagctggatgcgccgcgccgtaaggagctggagcgccagtttgcccgcatcgccgccatggcgcagccgctgatggactatcccctcgggccgcgcgaggagattgcgggggtgtataaagcatgactcttcaacacttcaccattgccgatctccagcgtgcgctgcacgatggcgaactgagcgcccgggagatcgcccgccagacgctggacgatatcgcccgcgtgaatccgcagatcaacgcctggaccgaggtcaccgcccagcgcatgctggcggaggccgacagcatcgacgccctgcgccgggaaaagcgccccctgccgccgctggcaggcattccttacgcagtgaaaaatctgtttgatgtcgccgggcataccaccctcgccggcgccgaactgctgagcgaccggccgccagcgaccagcgacagctgggcggtgcgccagctgcacagcgccggcgccctgctcagcgggatgctcaatatggacgcctacgcctacggcttcaccaccgaaaacagccactatggcgcgacgcgcaacccgcacgatctgtcgcggatcgccggcggttcttccggcggttcggccgcggcggtggcggccgggctggttcatttcagcctcggcagcgacaccaacggctcgatccgcgtccccgcgtcgctgtgcgggatctttggcctgaaacccactttcgggcgcctgtcgcgctctggcagccatccgtttgtcgccagtctggatcatattggtccttttgcccgccgggtagccgacctcgccgcggtgtatgacgccctgcaggggcgcgacccggccgatgactttcaggctgataaagccagcgagcgcaccggcaatctgctggaacgcggactggaggggctgcgctgcgcgcggctgggcggctatttcaccacctggtgcgatgacgacgcccgggcggccgtggatcgggtcgcccacgcgctgggcgccgacagcgagctgcagttcgcggatgccgcgctggcccgctcggcggcctttatcatcagcgccagcgaaggcggcaatcagtacctgacggatcttcgccactcgcccgagcgctttgaacctcactcccgcgagcggctgctggccggcgcgatgatcccctccgcgtggtatctgcaggctcagcgttttcgccgtcatgcccgtcaggcaatgaaatccctgttcagccaggccgacgtgctgatcgccccggccaccccatgcagcgccacgccaataggcgcggaggagatggtgattaacggccagccgctgccggtgcgcgccagcatgggaatgctgacgcagccgatctccttcctcgggctgccggtggtgaccgtgcccctgcgtaccgccagcggcaagccgattggcctgcagctgattgccgcgccgtttaacgaacaagcctgtcttcgcgccgcgcgggcgctggaagcgatgggcattaccgatgcccgagtggcggagagtgcagcatgatcaatctggataatgtagaccgcccggcgatcctcgccgaggtaacggcggcgttttatcagtatgaagaggcgctggtgagcaataacatcgaggcgctggatgcgctgttctggcacgacccgcgcaccgtacggctgggagccggcgaaaatctgtatggcatcgaggcgatccgcgcctttcgcgccgcccgccccgccgccggtctggcccgcgatctgcgccataccaccattaccacctttggcgcggatatggcggtgtgcagcaccgagttcacccgcgaaggcagcgcgcgcctgggccgccagcagcaaacgtgggtgcgctttccctacggctggcggattgtcgccgcccaggtcagtctgatggactgagtggcgtatacgggagcggaccggagaataaggtatccaccggcccgcttccggtccggtaacatgttatttggagtcgaagatcatggtgttcatcagagcggctgaagcagaagatatcccctcgctgcaaacgctatttctgcagctgggctatcagacggagacggcgatcttagcgcaacgcatcactgccccgcagagcatgatgagtgcgctggtggcggaaacagaaaacgccgtgtgtggcgtaatcgttatcaattttattttaccggtacatgagaaccgtttatgggcattaatttccgcgctggtcatagaggaatcgtcacgtggatcagggataggccagcagcttctccaggccgcagagcgcctcgcccgtgataaacaatgcgctcagatcgagctttcaagtagtgaaaaaagaatcagagcgcatcaattttatgaaaataacggctacaaggaggttcgcaaacgcttcgttaaacatttgtcttaaccgcctgcgcgcgagggctttccccggatgaccgtaactatattttgcccagcaggatatttaacatgcggcgcaggggttccgccgccccccacaatagctgatcgccaaccgttaacaccgagtagactgggtcattatttagcgacattttcttgtagcggccaatacctacctgcagcgaaccactaatagcagccggggtcaatttactgacactctcttgcttattattgcggacatagtttacccacggatgggaatgggtgactaactcagcaaattctgcttcgctgacctcacgtttaagtttcagcgtaatcgccgcgctgtgacagcggatcaccccgacccgaatgcataaaccattgaccgggatggtacccggcgcaaggccaagaattttattagtttccgcctcgcccttccattcttcgcggctatttccatcgcctaaatcgctgtcgatccagggaatgatgctgcccatcagcggtacgccaaaattctccaccggcatgcccgcgctgttaatcagctcactcactttatttaccaatggcagcacggaacctgatgccgtcagttcatccgcagataaatgctgactgatatacgcgctttgcgcgattaattcccgcacctgtttggcgcccgctccggaggcagactggtaggtcatcacgctcatccattcaatcaggtcagccttgatcagcccggccaaccccatcaggctcagcgtaatggagcagttgccgccgacaaacagtttaattcccgcttttaccgcactatcgatattttcgcggttgaccgggtcgagaataatgcaggctttttcatccatccgcagcgccgaagccgcatcaatccagtaaccttgccagccatggttaattaacgctggatagatggctttggtataatccccgccctgacaggtgatgatgatatccatttcggcgagtgcgctaagggaattcgcatctttcagcctgtcgcttttaccattaataaccgggcccggggcacccgcactggaggtgctaaaaaaatgcgctgtaatatcgtcgaaatcattttcttcgatcatgcgttgcaacaatactgagcccaccatccctcgccaaccaacaatacctacctgcttcatttatttaacctttataagttatgagaatgttaatttgagtgtcgccataccttatatcgtatcccccaataaaggtcattacccagcacatcgatttttatcattattaaaatgtttcatctgccatcagcgatatttatctcttattacggtcaagcagatataaggcggcggcgactgtccagttttcggcattcaaaggtgaaacggcgtagcgaaacggcagcagcttcttctccgggtaccatgaagagtaacttgcattttgatagtgactatgtcaatttgctggcaaaagccacctgctacctggacctcccatgaaaaatgaaccgctttgccgcgctccctgccccatcgcccgcagcctgggccgcatcggcgacagctggagcatcatgatcctgcgcgacgcctttgcgggctttacccgcttcgacgaatttcagaaaagcagcaacgtcgcgcccaatattctgtcgcgccgcctgaaggaactggtcgatgacggactgctggagaaggtgtgctacagcagcaccccgccgcgctacgaataccacctcacgccgcgcggccgcgatttccgcatggtgctgctggcgctggcggaatggggtaaccgccacttcgcccccgaagggcgtcagatgcagctggtggaaatggcaacccagcgccacgtggagccagtcatggtggataaagcgactggggaagagattatcccgggtaaatacgccatggtgccgggccccgccgcctcgccgctgatgaaatatcgtcatgaatatctgctgcgcaaacgcgaaggcgatagcgggcaaaaattccagcctgaaccttacagagatgccagcaatgaatccggccagtaagaaaaatattcttgtcctggcggccctgggcgctgccgccctggcggcagcgagctacggcgcttactggtggcataccgggcgctttatgcagaccaccgatgatgcctatgtcggcggcgacattagcgccatctccagcaaagtctccggctatatccagcagctggcggtgcaggacaatatggcggtgaaaaaaggtgacctgttgatccgcattgacgaccgcgattatcgcgccgccctcgcgaaagccgccggagaagtggcggcgcagcaggccgcgctggccgatatccaggctacccgccagcttcagcaggcgaccattaccggctctgcggcctcgttactggccgccacggcggcaaccgaaaaactggctaacgacaaccgacgctataacgccctggccgcgtcgagcgcgatttccgcacagatccgcgataacgcctccgccgattatcgccgggcgcacgccgagcaggagaaggccaaagcggataaaaccgtggccgaacgtcagctggcggtgctggatgctcgccagcagcaaatcctggctgccctggcgcaggcccaggctaacctcgagattgccaggctgaacctcagctataccgacattcgcgcaccgttcgatggggtgattggcaaccgccgcgcgtggtccggctccttcgtcagcagcggtacgcagctgctctccctggtacccgcgcacggcctgtggattgacgctaacttcaaggaaaaccagctggcgcatatgcgtgccggccagccggtgaccatcgtcgccgatgtgctgccgaaccatacctttaaggggcatgtcgccagcctggcgccggcgaccggctcacgcttcagcattctgccggcggagaacgcgaccgggaatttcactaaaatcgtgcagcgggtgccggtccgcattgcgctggaaggtgacggggcaaagcttgacgtcctgcgcccgggactgtcggtgatcgtcaccgtgaacgaaaagagccctcgatgagcaccgttcaggcgctgtccgccccgcagggtctgtcgatgccgacggcgaagaagatcttcgccttcgccagcatgtgcgtggggatgtttattgcccttatcgacatccagatcgtctccgcctcgctgcgggatattggcggcggcctgtcggcgggcgacgatgaaaccgtctgggtacaaaccagctacctgatcgccgagatcattattatcccgctttccggctggctggcccgggtcatgtcgacccgctggctgtttgccgcttccgcggcgggcttcacgctgatgagcctgctgtgcggctgggcgtggaacatccagagtatgatcgccttccgcgccctgcagggactggcgggcgggtcgatgatccccctggtgttcaccaccgctttcgccttttttcagggcaaacagcgggtcatcgccgcggcgacgatcggcggcctggcctccctcgcccctacgctgggtccaacggtgggcggctggatcaccgaaaactacaactggcactggctgttctttatcaacgttgttccggggatttacatcgcggtggcagtgccgctgctggtaaaagtagacagcgccgaccccactctgctgcgcggcgccgactatctcagtattctgctgctggccttgtccctcggctgcctggaatataccctcgaagaaggtccgcgctggggctggtttgatgacgcgaccctgacgaccaccgcctgggtcgccctgctctgcggcgtggcctttgttatccgcaccctgcgccatccgcagccggtgatggatctccgcgccctgcaggatcgaaccttcagcctcggctgctatttctcgtttatggccggcgtcggcatcttcgccaccatctatttaaccccgctgtatctggggagcgtgcgcggtttcagtgcgctggagatcggcctggcggtattttccaccggtctgttccaggtcatgtctattccgttttattcgtggctcgccaaccgcgtcgacctgcgctggctgctgatggccgggctgatcggctttgcggtgtcgatgtacagctttgttccgatcacccacgactggggggcggatcagctgctgctcccgcaggcctttcgcggactggcgcagcagtttgccgtcgcgccaacggtgaccctgacgctgggcagcctgccgcccgcgcgcctgaagctggcctccgggctgtttaatctgatgcgcaacctcgggggcgccatcggcatcgccctgtgcggcacggtgcttaacgacagaaccaatttgcactacagccgcctggcggaccatctgaataacgccaacctggcaatgagcgattttgttcagcgcagcgcggcaaacttcaccgtccaggggatctcgccggatgccgcgcagacggcggcgctgaaaaatctttccgcgctggcgctgcgggaggcgcgaacccaggcattttccgatgctttctacctcatcatgatgggttttttgcttgccgcgctgctggttcccttgatgaaaaagccgccggcacactgatactacaggagagttaactatgggcgtttccgttaaacgcattgtcgtcaccgggatggggattgtcagcccgctgggctgcggcgtacagcacgtctggcagtcgctgctggcaggtaaatcaggggtcacccggctcagcgagcagctggtcgcggatattccctgcaaagtggccggccaggtgccgtccattgacagcgatccgctgcacggcttcgacccgctggcgaccatcccggcgaaagagcgcaaaaaaatggatcgctttatcgagtttgcgctggtcgccgcccgcgaagcgctgacccaggccggttgggcgccggcatcaatggccgaacaggaacgtaccgccacggtgatcgccaccgggatcggtggcttcagcgagatcgccaatgcggtacataccaccgatgaacgtgggccgcgtcgtctctcgccgttcactatcccctcttttctggccaacctggctgccgggcatgtgtctatcgcccacggcttccggggccccatcggcgcgccggtcaccgcctgcgcagcgggtgcccaggccatcggcgatgcagcgcggatgatccgcagcggcgaggcggatattgccctctgcggcggcgcggaagcggcaattcatcgcgttagcctggccgggtttgccgcggcaagggcgctgtccagcgcctacagcgaccagccggaaagcgcttcccgcccctttgaccgtgaccgcgatggttttgtgatgggagaaggcgccgggcttattgtgatcgaatctctggagcacgcgctggcgcgcggggccacgccgctggccgagctggtgggctacggcaccagcgcagatgcttatcacctgaccgcaggcccggaagacgggaacggcgcacgtcgggccatggagatcgctattcgccaggccggggtgaccgtcgaagagattgatcatatcaatgcccacgctacctcgacgcaggtcggtgataaaggcgagctggcggcgattaaaacgctgtttggcgcgcatccggtcgccattacctcgacgaaatccgccaccggccatctgttaggcgcggccggcgggatcgaggccatcttcaccattcaggccctgcgtgaccaggtggtgccgccgacgctgaacctgcatcaccccgatgaagacgcggcaggcatgaacctggtggcgctgcaggcccgcccgcagaagatgcgttatgcgctgtcgaacggttttggctttggcggcgttaacgccagcctgctgctgaaacgctgggaataatcgtcaactcccccgcggtactggccgacgggggatttccaccgttgcggcttttgccctgctgctggagtaaatcaagtacaacgcaatacccagggagacaatggcgccgattcggctcatcgagaatggaatcgacgcattgtccagccagccgaagttatcgatcaaggtcagttttgagcgaagaacggaccacactatctaaataatgatatcgcctattatgttgggaccgctcatgttaaaaaagggatagcttttcttttcattgacgataacgaaggaattttcatggttgaggttgaggaaataaaaaagaaatatcccggcgcagatgcctggcaaatgggtgacagtccggaactggctaacgagcttgctgacctgatcaaaaaagggatcaaaacggcctcttgcggatcttatgcctcttaccagcaggaagaatttgccccgagagtcgggagttataacattattcttgatggccagaatgttccagtttgcgtgatcagactgatttcgatgcagctggttcgtttttgtgatgtcactgaagcgttcgcccgcaaagaaggtgaaggcgatttaagccttgaatactggaagaaagagcatcagagatttttcagctctgaaggtcatttttctgaagatatggagttgatcgcagaagaatttgaagtggttgaggtgctgtaaggcaaggtcaacgggctgacgttttatcactggccactcataacactgttcgcttctggcgcggagcggacaagctgtcgagctaaaggtccgcattgagcaaggagctgacgtgccagctataattggtaataaaatgagagtagaactattctgatttgtttaaaaaaacatttttacatccaagggcaaaatattttttatgctatcttacatgctatctcaatatgccaggctacctgtgcctgaagttactctacgttcatggttaaaacaatggttgtcagagcaggaatcgaggtgtacagacagaagtttctcggcgcgatttccctggagagaaactggattatgtcaggaatattttttacaacgaaaactcaaaattgatggaaagcaatttcttactggcccccgttatcagggcggaaatattaacaaaccttttattgatattgtaggtatggattctgacctaaatcatactgcattagggaaggtgcgaacaagttcctgatatgagatcatcatattcatccggagcgcatcccagagggacatcatgagccatcaactcaccttcgccgatagtgaattcagcactaagcgccgtcagacccgaaaagagattttcctctcccgcatggagcagattctgccatggcaaaacatggtggaagtcatcgagccgttttatcccaaggcgggcaatggccgacggccctatccgctggagaccatgctgcgtattcactgcatgcagcattggtacaacctgagcgacggtgccatggaagatgccctgtacgaaatcgcctccatgcgcctgtttgcccgattatccctggatagcgccctgccggatcgcaccaccatcatgaatttccgccacctgctcgagcagcatcaactggcccgtcaattgttcaagaccatcaatcgctggctggccgaagcaggcgtcatgatgacccaaggcactttggtggatgccaccatcattgaggcacccagctctaccaagaacaaagagcagcaacgcgatccggagatgcatcagaccaagaaaggcaatcagtggcactttggcatgaaggcccacattggtgtcgatgccaagagtggcctgacccacagcctagtcaccaccgcggccaacgagcatgacctcaatcagctgggtaatctgcttcatggagaggagcaatttgtctcagccgatgccggctaccaaggagcgccacagcgcgaggagctggccgaggtggatgtggactggctgatcgccgagcgtcccggcaaggtaaaaaccttgaagcagcatccgcgcaagaacaaaacggccatcaacatcgaatacatgaaagccagcatccgtgccagggtggagcacccgtttcgcatcatcaagcggcagttcggcttcgtgaaagccagatacaaagggctgctgaaaaacgataaccaactggcgatgttattcaccctggccaacctgtttcgggtggaccaaatgatacgtcagtgggagagatctcagtaaaaaccggaaataacgccagaaatggtggaaaaaatagcctaaataggctgattcgatgtgtttgcgggaaaaaaatcggcccagatccgcgaaattttaatcagcgagtcagcttgggaagaaatgacctgcttattcgcaccttccttaactcattccgattcggaactatctatgtatatgggcacaattattccgcagaatatcccctcgatgaaaactgcagaaagagcgggacgaacttgcatcctaagttatcaatttctacccatctgcagaacccacgactaacagcaatgctaatttatcttcagcctacttccgcttttggcacacaggggatgtccagggcccgggagtactcccctggacgcattaatgggcaggatgtgattgttgcgcaggctatcatatggcctgaggtacagcagaatcaggcttcgtagcaatgagtcggctcacagcgtccggaatccaccacccggtgccgtaaatcaccgcaaggtctgtcataaggtaatttcatcacacatcgcgacaccttttttctttacgcaggccttctctttcacggtttgtcagaactgtggaccgcagtaatctccactccgtgctttaatcaatgagagtgtgtcgggtgcaaattaaactacctttctcaacagcaaaggcgggatatccctgccctcgcagggtttctgcgtctggtaatatgcccatgacagtctcaaagaccgctttgagggtttcccggtttaaggcacataatcgcgtggcgttgcccccaaaatgcagcgaaaagcagcggtaaaggccgccgggcatgagaaaccaagctggcaagcgacctgtttgattggaacaccgttcgcgagaagatccaacgaagcgcaaattctggctctctgcttccatgttctaaaactaaagcctgtatccttcataaacaagcgggaaaaggtccgttccgacatggccgacataaaagccagctcgctcagcgatgcttcccagcgctgattgaccagtagcgatctggccgcgctaaataatcgctcatcattcggcatgggtagcgccatcgttaaaggtggagcctcgctgagaatttccagaagcaacaacgctatcttccgttgactcggtctggcgtagtcctcactgaacagccctgcgataagctctttgactaagggcgtagccgtgatcacatgcacctgttgactcttcgtaaagctcgtacattctgcgataaggctactgctgaaatagatcgccctgagatcggtttgtgaaagcagatggtaactatggatatgcaaaggcggtagccataatgcccgctgaggagggatcacccaacggtcactctctgtttgcaccagcataacccctctggtggcgaagagtagctgcccctcaacatgatgatggggaggatctacctcgccgcgttgatagcttatcgcagtacttgaccagcctgtggcttcatcatgtcttggcgctttatctatactacctggcatttcagatttagcccctgccattatcatatcgaaactggaaccacccggagtagagccttaggcaatgggtgcgtgacttatcattctgatcatcaaagatattacaggagcttaacctcatgcgtgtacactttatcgtacatgaaagttttgaagccccgggcgcatatgaaacctgggcaataaaccagggtcatgatgtaacttactcacgcgtctatgcaggcgatcggctacctgctgacaccgtaggcatcgattttcttatcgttatgagcggtccgcaagatccggacaccacgcttgaagagtgcccgcactttaatgctaaagcggaacaggcgctgattgcttccgcggttaaaaccggtaaggcggtgatcggtatctgcctgggttcacagctcattggtgaagcgctgggcgcgccgttctctcatagcccggaaaaagagattggtaaattcccgatcacattgaccgaagacggcagtaaggatgagatgttctctcactttgggaaaacactggcagtgggtcactggcataacgatatgccaggtttgacgccggaggctaaaattatcgcttacagcgaaggctgtccccggcagatcgttgcctattcagaccgcgtctttggtttccagtgccacatggagctcacattggacgttgtagaacggctgatcgctcattctgagaaagacctgagccgtgcagcagaatatcgtttcgttgacacgcctgaagcgctccgggcgcacgattacagtgaaatgaatcaagtactttttggctttttggataagctggaagcacgttacacagcagcgcaagcataatgttatgctcggtaagcttgccatcggttttgattttaatgtccgctcctggcacagagcgaacaagctatctgagttgaaggtctgatatgagcgatcagcggacgttggctacactgttaaacgtcgcagactcagcttctgactgccagtttttcgcgagttgggccttcaaagtagatgctcctgatatggcaattacggggttgagtcagcacaaagcgaattgcttcccagactgaacgcccattcatcagacgttcccccattttgggctggctatcgacaaacgcctctaaccctgtcagctcgaaatccgggggatacaacccagtcacacgtatattttctttagacaactggtacgaaagtttagttgtaaacccgctaagcccgtgtttactggcaaaaaaagcggggtgcgcaattgaatctgtaaaattaggaatcccacatgaagatataattgagacgatatccgcactttctgaacgtcttaacccgggtagcaatgcctgagtcagcagaatagaacctgtcaggcctgaactgatagtatttatgatttctgtgtctgattgatcgtctaacgttcctgaaagccactgagcagcattgaggattaaaatgtctatgggcttgtctaaagttaacaactgtgaagaaaactgagaaagggattcaggtagggttaaatcacagagatgccctttcgccattccgccttcagccgtaatgatactgcaagttttttgaatgtcatcagcgcgcctcgcgcaaaagtccacctcgacgccttctcgcgctaaccatacgctcagcgcctgaccaaatcccgtgccaccaccggtaattacagctcttttacctctcagcatcttcatccatcctttattaatgaataggggggaatgtagatatatatgaggaagcagattgacatctttcagttagtgccattttttgacgatagggataagttgtactgctacatttccatcgcgctcctgtgggcatgcaacatccgctcctggcactagtctgccgtaaagggcagctttaagggaggagcggacgagctaacgcaggtgaagatccgctgtgagcgaaaagcggatttttgtcgttctgtcatcaaaactggcgacttatattaggatatcgcaatacccctcgccctcaggctacgtctgcttgaattgattgcctcaagaaggcggaggcggctttccgctgattgccgctacgcgcacagcaggcgtaccggtcatttatgtcagcgtcggattccgcaaggggtatccagaggtcagcaaaaacaacactatcttagcttcgattaaggagaatggagtttttatggctgataacgagagcacggctattcatcctgatgttgctccagcagaaaatgaagtcgtcatcgtcaaacgcagagtcggagctttctcgtttactgaacttgagatgatccttcgtgctcaaggcatcgaagacctgattcttacgggtgtaactaccagtcgtgtggtgctttccacagtcggacaagcttttgatctggattaccgccttatcgttgtgaatgattattgcgcagatccagatcctgacaccaatatgtttttacttaaaaaagttctacctcaacatgcttttgttaccagttcctctgaaatatcaaaacctgggcataaaactatgaatttctgacgtcaaaaaacgggaggatataaccggggatccccagtcatctgaacgtccgctcctggtggcgatagtcagcatcatgtctggcccaggagaaatctccagaagcgtcagtgcgagaaggaaagtcataaacgtttcgatggaaggcatcctggtagagtccgaaaacatatttccgctacgttacctccgttcgatgcgggaaagaagcggacgttgtacttcaatcatcatcgatttgaatgacagcaaggtaacggctaatccaggtgacgtaaatgtgtcgcgatcccccagcttagaacggtacagcttccattaatcagctcgaaaacggcgtaactcgcattgggttgtgcatagcggtgaaaatcatccacagatccactttttaatgtcgcaagcacgccctgaatgacctgcccgtgagacacaatacatattgttcgatgatgatgttttttttccagactggataaaaaatgtatcattcgctgcgaagcatctgagagagactcaccccctggcggacaatactctgcatccaaggtgaataatgcttctgcggcgtccggattattttgcagcagcgctacggttgtcatgccttcaaactgaccaaaagcctgttctttcagagccggttcagctatcagtgaacaataaaaacgctcagccaggcgctgtcccatttgccaggcccggccaagtggagacgcgtaaacacattctacccggtaatcactctctgcaaacgctgccaataaagctgatgtttgacgctccccacgaagcgtcaatgcgctatcactgtgtccctgaataatattttttacattccattctgtttccgcgtgtcgaaccagtatcacttgcatcattgcagggtcacataagccgttatttgaaatgttatcatctaaaaaccctcctttgatatgcaggcaagttctcagctctcgacgaaaaacaggaacaagtgtagctgataatggttatgttcagcttcagaagtgacgtagttatcgacgttaacgtctgctctggcacagagcgaacgcttccccttgtcgacgcgaaaagcaactctgcccatgcctctatctcagtaatacctgtatcagttgaacgacgatatacactcccgctaccacctgtatgatccgaaacccccatctcagatagcgccattgatggcgttcgctggcatcagccgcttcaatcgcgggatcataacgttttcttttcctggttctgaaggtatcgaatccccacaggatgagaagaaagatgatgatgattttttcaacgataagatggttcacaaagagagactccggtattctcacggttacaggcagaatagataaaccgcctggatgtagccaccactaaatgtaggggtacctgaagacgaagccaggccttcctggattatctgtcttatgaccgcgtaaacgcatagcaacgccataaaagcgacattcatttccgacacatgctgccggagtccccttccccgacgcatcaggctgggtgataaaacgacggcggctgcccggtcacgcggcggaacatggtggcgaaagaggacgcattgtcgtatccaagggataatgccacttcgttcaccggtttgcctgctatcaaccatgccagggcgctcaccacgcaggctcgctgtcgccaggcggaaaacgacaggcccagctgcttcaggaaatggcggcgaaaagtactaggactcataaacagcgccctggcccagcgcgccgcaggatcatggatagaggggttaagcaaaaaagcctgacaaagcgccagcagcgccggatgctgcggcaacggaatgtcaaattcgcggaccggcatggcggccagttccagcaacatcaactgtatcagcgcgcgatcgcgtgggctgtcgtacaacggtggtaaatccacagcctcaagcagtagctggcgcaacagcggcgagacgctgatcacttcgcaacgacggtgtttaatgaaagcggccacacaatctggctcaatatacaagctacgcgtggtcacccctgcaaatctgacggcatgcacggtttcaggggggatccagacagcgtgttgcggaggaaccacccattctccgtcctgcgtagtgacatacattagtccggtcgcgccatacagcagctgtgcgcgacgatgctggtgcgggggcaggataaacccttgcgcatagtcattacctaacgccaccacatcacgatcgagtcgatcgacctcgtcaatttttacgttgcgcacacctgcctccctctgaccgatttacaaaggtaattgagcgctacgcaaatgggaagcagtacgcgaccggtataagctgctcgctcattttcaggtcggggatactctcttgaatgagatcgttattattgcgctggcaggctttactaccggcattaccacggtgctgttcggcttcggcggcggctttgtggtggtgccctttgtctatcaactgatgctccggcagccggcgatcgcgggcaacgccatgcatgtcgcagtggctacctcaacggcggtgatgatatttaacgccggctgggtcagctatcgaaactggcgggcgggcaggcttgccgcgcagacgctgtttccgttgttatggtttattgccattggggcggtggtaggctcctgtctggcggggatattgagcgagaatatcgttcgcgcgctgtttattctctatatgctggcaaccatcagcgattgtttgttgcgcaagggttttttcacgggcagcgctcggcgtcgcctgtccctgcccgtggtcaccggcggcggtgtgattatcggtacgatcgccgcattgctgggcgtgggtggcagcgtcatgacggtgcccctgctacgacgacacgggtatgcaatgcaggagtgcgttagcgcatccaacccgctttctttgcccgtggcgctatgcggggctgtgacctatgccgtcattggctggcacagcattccgctgagcggatttctggggtttatcagcctgaaaattttaagcctgctcgtcctgaccggctgggccgggatagtgtttagccgccgggcaatccctgcggtacctgatgtatggtatgcgcgcatctatgtgctgctgctgtgcctggtactcctcgccatgcttattcaataatcaaattacattctggtgaaccggtgtaacagacgcggccgggcggagccctctccctggagagagggccaggttcaggggcaacaagctacccgcgatacggatgggtttcgcgccagtggtcggcaatctgctgccgggtgcagacccacaccttgtcgtgctgctggatatagtcaaggaaacgctgcagcgcgcggaaacggcccgggcgccccagcagccggcagtgcattcccacggacatcatcttcggcgcggtttcaccctcggcgtacagcacgtcaaagctgtctttcagataggtataaaactgctccgcggtgttgaatccctgggcggtggcgaagcgcatgtcgttggcgtcgagggtataaggcacgatcaggtgcggccgctggctgccgtcgctgcaggtcacttcgctccagaaaggtaaatcatcgccgtaataatcgctgtcgtagtcaaagccgccgtgctccaccaccagctggcgggtgttagggctgtcgcggccggtataccagccggtgggcggtttgccgaacaggtcggtcagcacctgcaccgctttttgcagatgcgcgcgctcctcggcgatatccatgtgctgatagtggatccagcgccagccgtggctgaccacatcgtaatccgcggccttgatcgccgccacaatctccgggtgccgcgccagcgccatcgccacgccgaaaacggtcaacggcagcccgcgctggctgaactcgcgatggatgcgccagaaccctgcccggctgccgtactcatagagtgaatccatcgacatatggcgcgccgggtagctggcggcgccgataatatcggacaggaactgttccgaacccgcatcgccatgcaggacgtgattctccgcgccttcctcatagttgaggacgaactgcaccgcgatccgcgccccgcccggccagcgcgcgtgcggcggctcccctgcgtaacctcgcagatcgcgaggatagtgttcctggttctctcccatctcctgccccttttaaaatggatttaacgactgaaactgtccgcttaacgcttttttctccgggaacgctaagtccccatgcttgctggtcgccaggcccagcgcgaccagcgactccaccatcttcaccgccgcgctgacgccatcgatcaccggcacccgcagctcgcgggtcagctcctgcgccagggtcgccatcccgccgcagccaagaacaatcgccccgctaccatcctctttcagcgcgcgaatgcagcgctcacgcactttctcctgcgccaggccgctgccgtcttccagagccagcaccggcaagtcaatggcgtgcagcgccgcgcagtgttgatgaaatccgtactggtgcagtaaatgacgggcgatgatcaacgtacgcggcagcgtggtcacaatggagaaacgggtggcgaccatcgtcgccatatgcattgccgcctccgcgataccgatcaccggcccctgggccagctcccgcgccgccagcagccccgggtcgccgaagcaggcgatcacatgcccatccaccccctgctcgcgtccggccctgatctgctccagcacgccgaccgccgcgatggcttcgtcaaagtggccctcaattgacggcaccccggcgcggggacagaccgcaaggatctcggtgcccggcgcagcgaccgcacgcgcggcggcgcctatcgtttcggtcatcgccaggctggtgttggggttaatcacttgtatacgaacggaagacatcacgactccttgtggccggcgaacagccgggaaaaatcgggcaggctgacgccatcgcgctcgaagcacaggctggcgacaatatgatcaaaatggtgcatcagcgcctcgctgagcggctgcagggctttatcccgcagcaaaccgaccagctgctggtgatcgtcgcaacggcagccctgtcgccagggggcgccccaggcggcaatcactaaagaggagcgctggctgaggcgggtcaccatctcggtgagcaccgggttgccggagatagcctgcagctgaatatgaaagtcagcggagtggtggatcgccgccgggccgtcgtgcgtcgcatgggcctgctgttcacgctgaataatgttctccagcgccgccagatgcggcggctgacagcgcgcgatcacatcggggagattggcgacctcgagcagcgcccgggtgcgaaagatcgcctgggactcttccacgctcgggctggtgacgtgtgcaccacgtttgggcgtcaacgtgaccagttgcacagcggcgagtcgttgcagcacctttctgatgccggtgcggctcacggcgaacacctccgccagcgcctcttccggcagtttgctgcccggcggcagctgatgttcgacgatagccgtcatcagcgcctggtaaatgctttcgtccttgtcctgcagcgctggcgcggcctggagacgatgttcattattcattaacccactccggtttcacttatcgatagcagatcgtatacataaaatttaatttttgtatacaagattcatcattctggcctggatcctgcaatagcctcagcaatccatatcaaagggttttcattcagaggagcaggtttcatgccacattcatcccacacgcagcagacgaagactcacaaggcggccgccggctacagtccgcggctatgtaatgacgatctggcgccgacccgcgaccagaactggagctggtacaatatcttttcattctggatgtcggacgtgcacagcatgggcggctacgtagtggcggcgagcttctttacgcttgggctggccagctggcaggttctgctctgcctgctggtgggcatctgtattgtccagctgtgcgccaacctggtggcgaagccgagccagatggccggggtgccttacgcggtgatttgtcgtcaggcgtttggcgttttcggcgccaatatcccggcggtgatccgcgggctgatcgcctttgcctggtacggcattcagacctatctggcggcgaatgccctgatgctggtcctgctcaagttctggccctcccttgcctcgctaaccagcagcagctttctcgggctgtcgcccctcggctggctgtgcttcgccactatgtggctgctgcaggcgatggtgttctggcatggcatgaacgccatcaaacgctttatcgatatcgctggtccggcggtttatgtggtgatgctggcgctggccggctggattgtatacaagactggtctggacggtatctcctttaccctcgccagcaaatccctgagcgccggcgagcagacctggcagatgatcaccgccacggcgctggtggtctcctacttctccgggccgctgcttaacttcggtgacttttcccgctacggcaaaagcatgggcgagatccgccgcggtaaccgctggggactgccgtttaactttctgctattctcggtggttaccgtggtgattgtctccggcacccagtcgctgtttggcaaaatgatcaccgacccgatcgaaaccgtcagccgcgtgggtaacgatctggcggtggccatcggcctgctgaccatgatcaccgccaccatcggcattaatatcgtggctaacttcgtctcgccggccttcgatttttccaactgcgccccgcagaaaatcagcttccgtaccggcgggatgattgccgcggtgggctcgatactcctgacgccgtggaacctgtttaactcgccggagctgatccactataccctcgacgtgctgggcgcctttattggcccgctgtttggcatcctgatcgccgacttctacctgatcaaacgcggccgggtgtcagtggacgatctgtttgacgatacgccgcagggtaaatattggtaccgcaacggctttaacccgaaagcgattgccgccctgctgccgtcggtgggcctggggctgattatcagctttattccggccctgcatgaagtggcgaacttcagctggtttatcggcgtcttcctcggcgccaccacctaccgctggctggctcgcgacgagcgcgaagtgcaggcgaaagctgccttccgctccggcgcggtggcgcaaaaagagtaaccctccccacctgccgcggcgtctggccgcggcaggctgcaaactggcaccaatcttgctgtttatcactattcccagagcgttaagagaaggcaggttcgatgatggattaccagaccgcggtgcgcggtgcattttttgatatcgccggcgtggcggagaccccggatgaggtggccgcccaggcccgctatctcgatgatggcttgttgttcctgcaggaggggaaaattatcgccctgctgccatggcaggagggggaagcctttctgcatcccctgaagggctatgtcgatctgaggggtaagctgctgctgccggggttcgttgatgcccacgttcactatccgcagaccgagatgatcggcgcctttggcgaacagctgctggagtggctcaccacctacaccttcccggtggagagccagtttgccgatgcggagtatgcccaggagatagcgcagttttttgtaaatcaattgataagccatggcaccaccaccgcgctggtgttttgtaccctgcatccggcttcggtggaggcgttattcagcgaagcgctgcgtctgaatatgcgcctgatcgccgggaaagtgatgatggatcgccatgtgcccgactacctgtgcgaaaccgccggggagagctacgagcagacccgggcgttgatccgccgctggcatcagcgcggcaggctgggctatgccatcaccccgcgctttgcccccacctcgaccccggggttgctggaggcggtgcagcgcctgcgggccgagtttcccgacacctggctgcagacgcatctcagtgaaaaccgggaggagatcgcttgggttaaacagctgtggcctgagcatgcgcgctatctggatgtctatcatcactatcagctcaccggcgaacgcagcgtcttcgctcacgggatccatctcgatgatgccgagtggcagtgcctgcatgacaccgggtccgcagtcgccttctgcccgacgtcgaatctgtttctcggcagcgggctgttccgcctgcccgcctgctggcagcaccaggtgcggatgggcatcggcagcgacgtcggagccgggaccaccttcagcatgctgcggacgctgggcgaggcctacaaggtaggacaactgcagagctatcgcctgcgcgccagcgaggccttctatcacgccaccctcggcggggcgcgcgccctgcggctggaggagaaaattggcaatttccagccgggcaaagaggcggattttgtggtgattgacccggcggtcaccccgctgcagcgcctgcgcataggccgctgccatgacatttatgagcagctgttcgtgctgatgaccctgggtgatgaacgcaatatcagcgagacgtgggtgaatggcgagcgggtgtggtgtcaggattgacccgtttgagaagcggaaacaaccttcggtaagacaataaatcagcaccaagccctaaatgatcttaaaagatccttcagggggattaggctggttaccagttaccgtaagggtagtgcttccctttgataaaatctataatatctttgtcatatccataagaaaaatcgctccttgttatatctttacaaatatctaatttattacctgatacggttttcaggactgacggagtgacgcggtaattagattcagatccacttccctgtaaccagacggccacttttccttctggagccagaccaatttgcattctgttgtaccaggcaatacgtccccgataatccttatatttactcggcataagcatctgttccagtaccgatttagggatcgtcaaatgggtttcatacacttttttatcaataatcgagtcccagcaaaaaataatatgtcgtggagggcgctttacgtgattccagtaccctaccggcgcacggtctttgtcgttccactcgccgatcacgccaggcagatcgggtgtgctattcagcgtgttaaagcgatagtcatttccatcaacgtcaagaatagcggcaaacgtcaccacggcgggtaacgctttgggtgtgaaaaagttaaaactccactctgttggcgcatcactatgcatggcggtgttgggcaaaggttttccctgacaggcagccagcgccaataatggaagcagacaggccgcacgtattatttccatattttatttccgtccatatcgtaaacggtacgctgccagcggtcatcaggccggttggtgaatgtcaccagcttcgccggtttgaccgcaccgctgataataccccgactgtctcgtataacgctgttccagttggccgagcagtggatatatttttcggccaacatccgcaattccggtgtggtaaagcctggggcagacttaccactccttatcgctcggcccatcgcaatcgctttttcacacaaaccgttcagttcttgcctaagctttaagtgtgcatttgtatctcgaataggttcaaacaccgccccggcatcctgggccgcatcgagcatcacccgcaataccacttttgaccagtcgttgaaagtcggacggttgataaccagagctgctccactgcgtttctgtagcgtgccgtaacggtcagctggcattctgtcgtcatgccaggtatcgacgctcacctctaccgcatttagcagtagagctattgccggatagccgtccatggttttaagttttgcacaggtctgccggtaaatacgcgtttccgtatccgggatggaaaaggggacggtttcaaactctggtcgggtaaggaaataagcttcattctcgttgggattatagccgccaccaatgtcggagtgcgcaccgggtagcgccagctccggccacgctggctttacgctgttcaatgcaaagttaaaacgacattcatgctgcgcggtgatgtgaaaaaccttctccgctacacctggacgtagcgccagattgacatctcctgtgtctgcgctgtgcgggttaaagccgttaaccggggtgccgatcgccgccacggtatcaaatatgcccagaaagcgggttttaccacccggtgcaccggagaattcaataccattcaaaccggctctaatcgccgtgataatgtcacggtcctgactgaatacccgattggcaaagtgccgtgccgcaccagccccgcgactgaaaccgaatatatcaaattgtatctctttgatggtgcaggaaccatcgcttgcatgctgaagtaaatattcctgaataccgacagtcagagctgcaactgccttatcggtttttctcaccacaccggtatcgcctcgaccagtacccattccgtaagtattgtcgccagctccgtcttccgtgccaataccttcaacataaatggcgtgctggcctgctccgctatcgggtcggatatcctgcctgtacaatatatacaaccagtgcacattgctataatagccaatatagctccctgcggcagtaccactatagccatgctttagtcgcacgcactgaaagtacgccgttaccgcatcggcgtcattcatcccgaaatgttcgccggaacaggcggcctgacggtcaccgctattattcgcattgtttccggttccatcaaaaaacacaccgatggttagtgtgatttcccgttttttctttgcggcctgcgcacgctgttcaggctcaggctgttggttttttttcttcgccgtttccgcccgttcagctacccgcccggcattgcagtccctatcgtaggagtgagaaaagacggtcgggacgaaccgagcacgacacgggcaagagctgtagctgtccagtgagccagcccattctttcagggatccaccgacatcgtaggtgtcacccattcccccacagacgcgaaatcgcccctcgtgcttaccgcaggtcaccggatcgcccaccctgacctgttgccgctcaatgccgccaatgtggtaagtgtcatcaggcgcacccgaaagtatgcgtcccccacaggtggttttatccaggtgatacagaaagaatcccttcgccataatccctcacgaatgtaatggttataaaatcaacgcatcataccctgaagcatggctaagtcgaaattacctgtttctgattattgttaccgcgcctgaattggcccatttgcaggactatcaaaaactcattgccaggcctacaccatagcctgtggtgttattgccgaacatatagcgcgccaccagccgggtgcgggtgataaagaccgggtatttactgctgtccagctcgaggccaacccccaaggaggtcaaaccggtaaagcccagcgcccctcgctgctcgccgagaaattcagtatgcgccccctccagcacataacgcagtgggttgcccagcagcgtccagtcggctatcggcgcgcggcggcgcagatacaggccgagattctccgcgctggcctcgccctgcaccacctcggcgctactgccgaaactttgcagatgcatataggagtaacgcagttcggcatcaatatcctgggtggcagagaagcgttcgtaatccagcatcagtgccccgcccagcccccaggcgttgaaccgaccgccgtcgagaaattgcagatcggcgttggtttttcgctcaattgcccagctaccaatacgcgcatcgctggccagggtaccgagcatcacattgacgatcggccgcagcaccaggttgcctccgaggctgtcccggtgcagcgaaaaatcccaaccgacgccgccggtggtggtcagactgttccatttggtcggcacattccgcgtctgttcgccattgctgaccacaaagcacgggtcgtaacggctgtaacccatcgtaccttcaaggtacagaggaaacgactcgctgagggttgccccgccgccaaactgggtgatggccagattatgtttgtcgttgctgccggaaccaatgttgagatcgctggcggtcacgtcagggacgacggtatagctcatcagagtcaatacggcatcggcacgctgtttgatggcgtggccgttcgccgccagcgtcgctggcgcggaaagcgaaagtaccgacaggagaacgaaaagacgcaccatatgtcgtttgccacctcagcgacaggctaacaatattgccacctaaatcagcaggctggcgttcactcagtatagtcggtgagtcaacctgcgcgtccggcggggagaaaaagcatcgggctggtcaggccgcgcctccgcggctatgcagcagttccacattttcaaacggcatgcgcgagacccgattacgcccatcattttttgccgcatacagcgctttatcgacgcgggaaaacagttgatcaaccgtttcgccgtcatgatgttcagccacgccgatgctgacggtcaccgacagcgtctggtattcgctaaccgcctggcggatcccctccgccagtatcagcgcgcggccgatcggcgaatggggcaaaaaaagcagaaactcttctccaccccagcgataaattttatcttcgcggtcgaccgacgtttccagaatacgagagagcaccagcaggacctcatcgcctttttgatggccgtgaatatcattaatgctcttgaaatgatcgatatcgattaacagcagacaataaccccgggggataaaagttggcgcctcaaccagacggtgaaactcccggcgattaagcaagccggttaacggatcgtgggcggcggaaaattccagctcttttttcagatgcacttcttcggtgatatcgtgaatgatgcatagcatcagtcgaatattatacagcaccaccggcccggcataagtttggacatggcgtagcgagccgtcagccagaatatgcgtaaaattaagcggtttatgaccgccaggcagattggcaatattattcataatggggatgacgtcccggcccagggtatttatttgccaggtatgtttagtgcgcatttcctcatcggaataatgataaaaacgtagcgcggcaatattggcatcgacaatccggccatctttatgagggtcgatcaacagcatcggcgcggtattggtcataaaaaagcgagcgaaaaagccattgttacgccgctggtagcggcgggagccggtatgaatcgactgattttgcgccagcagcttcacggcttcaaacagcagcaagcaaccacagtcttcggtatcaatcagggtggttttgcaatacaccgactgcaacccattggcggtgggtaacgtccagacttcgaatatctcgctcatggtgtcgagatagcgaaggtagtgctgcagttgcgtttccggacaggtggaataaataccgttacgcatctcattgagcgacatctcgccgctcaatgtccgggaagcctgattggcatagaccaccctttcgttaaaaggatgaactacccatatcggggtgcttaagacctcaaaaacagccagctcttttaataacatacaggccccaaaccgacccactgccggcgcggaacggcacttatcgctgtgcagccccaacgctggtttaaagtgaaagcaaaatagacaccgagaaaccgcaattacgcgcgagcgcgccaagtatagtcggttatgcgcccagtaaagccctctgagggtgactttgcgcgcagtttaaccaacagaagcgatgctgcctttaataataattttatttcaacagcatagcagcaatgccagaacgggtagtcgcttttgatcacagagtgtgcatcgccaacaggggttacccggcaggcgcagcggcataggccagggcgggcagagagtcgcttttctgcccaggctaaccgtgatagtttctatcattacgctcattcatagcgacaattaccttgaaaaaaatcgccactaaaatcacccttgccgacattgcgcgtgaagcgcgcgtcggcgtagccaccgtcgaccgggtgctcaataagcgcgcggcggtgaaagagtccacggcgcggcgcgtgctggaggccgcccgccggctgggttttaccctcgagcagccccactatcgcctggctgccggcaaagcgccggtcacgatcagaatgggctttatcctgctgcaggagagccactccttctacctgccgttggcccgggcgctgacgcgcgaggctgccccatggctaccggcgggccaggcgccggtgatactgcattttgccatcgatgcggtggaagcgatggctcaggccattcaccgactcagcgatgaagtggaggtgctcggcctggtggcgctggatcacccgctgattcgccacgcggtggcccgggccgccgcccgcggcgtgcgcgtgttcaccctgctttccgatctgtcggtcccccagcgcagcgggtatatcggcctcgataatcataaagccgggcgcaccgccgcctggtttatcgagcgcttatgccgggggaatggcgaaattggcattatcattggcgataatcgttttacctgccaggaaagctgtgagatcagctttcgctcctgcctgcgagaacagggcaaggggcaacaaatccttgagccggttcgcagtcatgaacgggcggatatcgccaggaccgtgacggaacagatgctgactcagtacccggccctgcaggcgatctacgccccctgcggcggcgtcgaagggatcgtcgacgcgctgcgcgacagcggccgtcagcaggagatcgctctggtctgccacggtccgctcagcgacagtgaactggccctgatcgatggcaccatcgacatcatgcttaaccaccggctggatgagtttgccgccgttacgctgcgcgccatggcggacgccgcttcacgcccccatagcgaggtgatttcattccctcagcctttcgatatcatcaccaaagaaaatatgtaaatttccggctccgtctccagcggagacgggtatcgggcggaccgcgccacctctcgatttgataaaaaattatcaaaaaatccatcaattaaaatcatgatgattatcataaaatcaaaattccatcattgttgataatgaaatttttattcaatactcagcggcatcccttgtatgaaaaaggaagccgacatgatacatcctatcgctaacgccccctgcagctggggcgtcgatgacccgaaaaaccctaacctccctgcctgggctaccgtgctgaaggaggcggcgcaggctggctatcgcagcattgagctcggcccctggggttatctccccagcgatccggccagcctgcgcgcggcgctggagcagcatcagctgtcgctggtcgccggcacgatctttgacgatctggtgagcgaggcccatttccccaccctggtggcgctgacccatcaaatctgccgcaatctgtcgcaggtagccgctgccgaaccgatcccgggccgccctttccagccgccctatctggtgattatcgacttcggcaaccccgaacgggcgcgctttgccgggcgcggcgcgctggctccgcgcctcaatgacaaagactggcagcgcatgatggagcatattatcgcccttagcaccctcgcctggcaggagtacggtgtgcgggcggttatccatccgcacgccgggggcagcattgaattcgcggatgagatcgagcggctggccaacgatatcccgcacgacgtcgccgggttgtgtctggacaccggacatctctattacgccgggatggatccgctcgactggctggatcgctattaccaccgcctggactatctgcacttcaaggatgtcgacccgcaggtttatcagcgcgctatccatgaaggtatcgacttcttcactgcctgcgccgaaggggtgatgtgcccgctcggcagcggcgccattgactatccggctatcaaagactttcttgcccgccgggggtatcagggctggataaccattgaacaagagcgcgacccgcgccatgccgcaggcagcctgcaggcggtcacggaaagtctgcgctatctgcgcgacgtcggattctgacaggaggcacgacatgattaacggtttaaaacctctcgaccgcaccctgcgctggggcatggtcggcggcggcggcagcagccagatcggctatattcaccgctctgcagcgctgcgcgataacaccttcacgctgctggccggcgcctttgatattgatgccgagcgcggacgccagttcggccaacagctgggggtggatcccgaccgctgttacgccgactatcaaagcctgttccgcggcgaggctgcccggcctgacggcattcaggcggtgtcagttgccacgccaaataacacccactatgccatctgccgggccgcgctggaggccgggctgcacgtggtgtgcgaaaagccgctgtgcttcagcagcgaggaagctgacgagctggtggcgctcagccagcggcggcgcaagattatcggggtgacctacggctatgccggccaccagctgatcctgcaggcccggcagatgatcgccgacgggctgctgggcgatatccgtatcgttaatatgcagtttgcccacggttttcacgcccagccggtggaacaggaaaatgccagtacccgctggcgggtcgatccccgcttcgtcggccccagctatgtgctgggcgacctggccacccatccgctgtttctggtcgaaaccatggccccgcagctgaagatcacccggctgatgtgcgccagacaaagcttcgtcaaaagccgcgcgccgctggaagataacgcccatgtactgatggagtatgacaacggggccatcggctcactgtggagctccgccgtcaactgcggttcgatgcacgggcaaaaggtgcgaatcatcggtgaaaaagccagtctcgaatggtgggatgaacagcccaaccagctacgctacgaaatccagggcgaacccgtgcgcatcctcgagcgcggtatggactatctcgatccgctggcgcgtcaggatgatcgcatcggcggcggccatcccgagggcctgtttgaggcatggtcgaatctctatcgccgcttcgccatcgccatggatgccgccgaccgtcgcgacgaggcgctgctggccgacttctggtacccggacgcccgcgccggggcgttcggcgtccgctgggtggaaaactgcgtgcgttctgccgacaacggtgcctgctgggtcgacttccgctaactcgccggctcagggcgttcgtcctgagcctttacggctatttttctgtccgcgccagctgggttttatccgcctcatgggcgcggtccgccagcccctggaacgctccggcgccatagtattgcgcgggaaccggcaatgcctgcatatcgtgccctggatagatctgcagttcgccgaggtcgcgtaagcggaatcccccgacctgctccggcatggtcaggcgatacggcggcatggtttcgaatgggaccggcgtcggcagccggttttcctgtagatcgtagttacgcttcagtaccagaaacttatccggcacccgccggtgactgttccaccagtcgccgtcgatctgctgaaacatcgcttccgtctctccgcgcgtcgccaccagcagccgggtcagcacttgtttcagcgccgcatccatggcctggttataatcctccagcgaaccgccgtggccgctgaggatgacattaatcgccagcctcgcgcccagtaaattggagtagagatcctcgggcgaaaaagcggaaatctcttcggaaaacccggggaccgactggaagccataccactgggcgatctcatgccactgggcgatttcgaaggccagatgcccggcgagccaggccgccagctgatagcgctgcctgacgcccgccggcggcgtaaaggcattcagctgcacgcggcgcacgcccagttcttcactgtagaagatccgccccgcctgacccagcgtcggcgcaatacgattgaacagataaaaggtgttgtccgccgtatcgcgcacatgggcgatatcaataaacccgccgcggcgggtatagataagcccgttctgctcctcgctgagccccagcagatttttcaccgcaccgaacgcgctgtcgttgtaatggtgcttacccagcgtacccagagtcaacacattaccgatctggtacatcgggatcggaatgcccgccgcgcgcacgtgcaggtcgtaaccaaaagcgcagcacggtcgcagcgactccggcggcggcagctcaccgagggtgggcgccgtatggatcgccgtcacggcgggtagcaccggatcctgcgccagcgccggcagcgccagcgccagcgccagcgccagcgcgaataatagccagaaggctttacgcatcaacagcctctccacagcaataaaagtgcgcgcatcttaccggcagatagcgcctgcggttttagttaaaaacggtattcagcgccgacaacgaaactattgcgcgcgtaaaagccgctcttccgttcgtcgcggcccggtggttagtagttcttgcgcggaaaagcgctggctatcccccattaccatcatcctgcgtcaaggtggcgcggtgattgtattcaaaaggtgaatgtcgtataacatagcgctaccgaggggtgtcccgtgagggctgagatggcgcaagccgaaccctttgaacctgatctgggtcatgccagcgaagggacgggtcggcaattttgccagcattaccgccattgcctgttcacacccctgcacgcccggatctcccctgaataaatggaggtcctgtgatcgttcccgcttttagccaaggtctttacggccgtttacgccagctggccgccgctgactggcagcgctatgtggcgcatcctttcgtccagcaacttgccgatgggacgctggcggaaaacgcctttcgtcgctatctgacccaggattatctgtttctgattcactttgcccgcagctacgcgctgctggtgagtaaactgcgcgcgctgccggagatgcgggccgcggccgcctcaatgaatgccatcctcaacgaactgccgctgcacgtcggctactgtgcccagtgggggattagcgaaccggagatggccgcccaacctgaagcccccgaaaccctcaactatacacgctacgtgctggatattggccactcgggtgacgcgctggatctgctggtcgccctgatgccctgcgtcgcgggctacgccgaaatcggtctcggcctgctgcagcatcccgccacccgactggacgataacccctacgcctcatggatccgcaactatggcgatgaaggctatctgcagggcgtcagcgccgcgctggcgctgttggaaacggtgtggcagcagcgcgggagcgaggcgcgaatcactgagctgagcgagattttcaccaccgccacccgccttgaggcgcagttctggcagatgggcctcaacgccgcggcggagacccgggcgtgacggcgccgggtatcgaggtccgtggcctgagcctgcatgtcggcgaccgtcggctgttcgacaacctgtcgtttacggtccccggcgggcagtgggtgtcgctgctcggcgccagcggcgccggcaaaaccagcctgctgcgggtgatggccggtctggcgcccgccacccgcggagaagtggtcgccagcgatgggcaaccgattcagggccgtctggcgtggatggggcagaaagatctgctctacccctggctgagcgttagggacaacgtcgccctcggcgcgcggctgcgcggtgaaaaagtcgatcgtgcccgggtcgccgccctgcttgaacaggttgagctttcatcctgcgccgacgcccgcccggcgactctctccggcggcatgcgtcagcgcgccgcgctggcgcgcacgctgtatgaggatcgccccatcgtgctgatggatgagcctttctcggcgctggataccctcacccgtacgcgcattcagaccctggcggccaccctgctggccggtcgcacggtggtgcttatcacccacgatccgcaggaggcctgccggttgagccaccgcctgctggtcctctcggcggccgacggcgacattgatgatagccatcacctcgccggcacacctccgcgcgcgccggacgcgcccgatctcctgatcggccaggccgccctgctgcagcagctgatgagggcccaaccatgactggacgtctctggcgcggcggtatggtgttcggcgggctgatgcttctctggggtctggccagccgcagcggcattccccattttcttttaccgtccccgctggcggtcgccgaggcgctttgggttaatcgcgcctatctcggctggcatacgcttatcacgctcagtgagatcctgagcggcctggcgctgggcgtgacgctcggcgtcaccctggcgctgggcatgatcctctccccccgtctgcagcgctggctgatgccgctggtgctcaccagtcaggcgatcccggtctttgccctcgccccgctgctggtgctgtggctgggctttggcatgagcgccaaagtggcgatggcggtgctggtgattttctttccggtgacttccgccttctttgatggcttgcggcgggtcaaccaggagtatctcgatctggcgcgcagcatgaatgcctccttcggcgctcaactgcgacatgtccgcctgatggccgccctgccggcgctgggctctggcctgcgcatggcggcggcggtggcgcccattggcgcgatcatcggcgaatgggtcggctccgccgaggggctgggctacgtcatgctcaacgccaatgcgcgactgcaaaccgatatctgcttcgccgcgctgtttattttagtactactgaccctcctgctgtggctggcggtagataccctgctacaccggctgatcgactggtcgccggaataagaatgacgtaataaaggaaaacagatgaaaaagtcgctattcgccggggcaaccttgacggccctgttcagcggccacgcgctggccaatgaaccgctgacgctggtgctggactggtacattaatcccgaccatgcgccgattatggtggccgagcagatcggcgcctttaaggcccaggggctggacgtcaggattgtccccccttccgatcccgcgctgcctccgcgcatggtggccgcccgtcaagcggatctggccatcacctaccagccgcaggtgcacttctttgctgacgaagggttaccgctggtgcgtgtagggactctgattaattcgccgctgaatacggttatcgccctggataagcagatcaaaaccccggcagatctgcaaggcaagaaggtgggctactcggtcagcggaattgagcaggccaccctggcgaccatggcgcaacatgcggggatcgatccggccagcatcaaactggtgaacgtcaatttccagctgaccagcgccctgctggccggccaggtggacgcggttatcggcggctatcgtaatatagaagcgcaggagctgaagctgcagggcaaaacgccggtggtgatgaacgtcgaagattacggcgtgccggcctatgacgagctggtgattgtcgcccatcgcgacgcaattcatgaggcgaagatccgtaaattcctcaccgccctgcaggcgggagtgggctatctgcgcgcccatccacagaagagctgggaggcgttcgccgccgcccacccggagcttaggaccgaactcaaccaccaggcgtggttgcaaaccgtgcccctgttcgccaccgatccggcagcgctggataaagcgcgctacgagacttacgaacagtttttatataacaataagttggtgaaaaaagttacacctttaacaaattatgcggtggaactgcattgagtcttgctatcgctgacggaaggcattccgtcagcgctttaacgtagcggcaataaaaatatagagactttctcactaataattacactttaaagggttatagtgacagagcgttgttctattataattcagcaagttacgttaattttgcccctggtaagaataacgtcaaaatagcgcaatcaataaaacgttgaatgcggatttaaaaagccatatattgtgcgcgctttatgaatgccaattcaatttcttacaccaattattcaaccagcgttcaaccgcaatgctggttgtgggagtgatatgatgacggataaagtccgtattgatactttacgtgccgatttattagacgcaaacaacgaaacctttttggcccgtcaggccgaattcgaatcgaatgtcaggagttacccgcgtaagctgccgctggctatcactaaagccgaaggcgtgtggctgacggatgcggataacaaacagtacctggactgcctcgcgggcgccggtactctcgctctgggccacaaccaccctgatgtattgcagagcatccaaagtgtcattaccagcggcttgccgttacatactctcgatcttaccaccccgttaaaagatcgcttctccgaatacctgctctcttgcctgccgggcgaagggaaagaatattgcctgcagttcaccggcccgtccggcgctgacgccgtggaagccgcgctgaagctggcgaaaaaatacaccggtcgtaccgcggtgatcagcttctccggcggctatcacgggatgacccacggcgcgctgtccgtcaccggcaacctgtcgccgaaagcggcggttaacggcatgatgccggaagtccagttcatgccttacccgcacctgtatcgttgcccgctgggcatcggcggcgaagccggcgtgaaagccctgacctactacttcgaaaacctgatcaacgacgtggagagcggcgtccgtaaaccggcggcggtgatccttgaagccgttcagggcgaaggcggtgtcaacccggcgccggtcgagtggctgcagcgcatccgcaaagtgaccgaagagcacggcattctgctgatcgtcgatgaagtgcaggccggctttgcccgtaccggtaaattcttcgccttcgagcacgccggtattcagccggacatcatcgtgatgtcgaaagcggttggcggcgggctgccgctggcggtgctgggcattaaaaagcagttcgacgcctgggaaccgggtcaccacaccggcaccttccgcggtaaccagctggcgatggccaccggcctgaccaccctgcgtcatctgcgcgacaacaagatcgccgacaaagtcgccgcccagggcgagtggctgaaaggtaaactggccgagctgcagaaacgctacccggtgattggccacgttcgcggtctcggtctgatgatcggtatcgaaatcgtcaagccgaacgaagcgcaggatcacatgggctgctacccggctgacggcgaactctctgccctgctgcagaagaaatgcttcgaagcgggcctgatcctcgagcgtggcggtcgtcacggctgcgtgctgcgcctgctgccgtccctgctgatcagcgacgcggagctggacgtgttcctcgacaaatttgaacaggccctgctggccgccggcgtaaaaccggtctgagtggagtaagtgaccgccatgtccacattgaatccgattcttgctggttcagcgcagagcgttgaagcctatcagcaggttatcgagcagaccagccaggccgttgtgcagtggctgaagcaacctgagatgtatcaggggaaaagcgttgacgagctgcgtgagcgtatctccctagaatttaacgaacagggtttgggtaaccaggcggcgattgatcgtgcgatcgagtacttcctgaaagacagcctgtcggtgcatcacccgcagtgcgtggcgcacctgcactgcccgagcctggtgattagccaggcggcggaagtgctgattaacgccaccaaccagagcatggactcctgggatcagagcccgtcggcaaccattatcgagatgaagctgatcgaatggctgcgcgcccgggtcggttttccggcgggcgacgccggcgtcttcaccagcggcggcacccagagcaacctgatgggcctgatgctggcgcgcgacgccttcttcgcccgtcagggccactccatccagcaggatgggctgccgggggatatccgcaagtacaaagtcttgtgctcggaaaacgcccacttctcggtgcagaagaacatggcgctgatgggcctcggctaccgctcggtaacgctggtgaaaaccgacgaattcgcgcggatggacgtgtccgacctgcaggcgaagattgcgcaagcgcaggctaacggcgagcagatcatggcgatcgtcgccaccgccggcaccaccgacgcgggcgctatcgacccgctgcgcgacatcgccggtatcgctgcggaacatcagatctggctgcacgttgacgcagcctggggcggcgccctgctgctgtctgagcagtatcgcgactaccttgacggtctggagctggtggattccgttaccctggacttccataagcagttcttccagaccatcagctgcggcgcattcctgctgaaggacgcgcgccattacgagctgatgcgttatcaggcggcctatctgaactccgagttcgatgaagaacacggcgtaccgaacctggtgtctaagtcgctgcagaccacccgtcgcttcgatgcgctgaagctgtggatgggtctggaagcgctgggccagaaacagtatgcggcgatcatcgatcacggcgtcacgatggcgaaaaacgtggcggagtacgtgaagtcgcagccgacgctggagctggtgatgcagccgcagctggcgagcgtgctgttccgttcccgtccggcgcagatggccgggagcgacgcggcggctatcgcgctgctcaaccagcgcgtcggcgacgccctgctggcctccggccgcgctaacgtcggcgtaaccgagcacaacggcgttacctgcctgaagctgaccctgctgaacccggtggtgacgctggatgacgtgaaggttctgctgaacctggtggagcgcaccgctcaggagctgctggcgcaataacctgccttagcgaggcggcgcctgccgccccgctgtcagccttgcctgcaataagccgataatgtccttatcggctttttttatttctttccgcaccgctaatgctctcttcgcagggcccgttgacccctgcccctcgcgatgccacagtactatcccgaaaataacaacgttcaggataaacgtcctgaaaatggggatgatgatggagaaacgcttaccagggctggatctcgacgccctgcgcagctttgtgaccggcatggagtgcggcagtttcgcccaggcagcgctgcgcctgtcgcgttccacctccgcggtcagcgcccagcttaaaaagctggagagtcagtgcggtgcggcgctggtgaccaaacaggggcgccatctggtgctcaccgcggaaggcgaaaagctgatgagctacgccagacgcctgctggcgctcaatgatgaaaccctgcgcgcgctgcagggtgagcggctcaccggcgagatccaccttggtatgcaggaagattttggcgaatcgctgatgccggagatcctcgggcaatttaaacggcatcatccgcaggtgcggatagtcgccagggtggatcgcaatggtccgctgcgccaggcgctggcggaagaggcgctggatctggcgctgctgtggcaaaccgaagatcagggttccgggctgggcctctgcccgctggcgtggattgcgcatcctgacctggatattcgcgctctgctggtctccggcgagccgctgccgctggtgatgttcgacagcccgtgcctgatgcactcccgcgccattgcctgtctcgatgccgcggggatcccctggcaggtggtgttcgtcagccacagcctgagcggcatctgggcggcggtgcaggccgggctgggcctgacgatacgcacccgcatcggcatgccaggcaacctgcgccctgcaggaggactgctgccagcgccaggaagtctggccgtcagcctgcgacaaaccccgcgtgaggaacaccattccgccgccgtggcgctgctcggcgaactgatgaccgaggccctgcagggatggctcgacaggtgacagtgtcacgccatttcattcaccctcaccctaaccctctccctgaagggagagggaaccgttcggcagccaccgacaatgagcatccagcgcctctcccgcttcaatgcccggtggcggctgcgccttaccgggcctacacgcggctccgtaacgatgtaggctgggcaagcgcagcgccgcccggcatcaggtataagggctggagggttccgtccgccagacgcctgcgccgcgggtcaggctttgctctcctgcagcagctgctggatcacctgctcctggcgggcataatccccttcgccgaatgcggtataacgcagctgtccgcgagcgtcgaaaatgtaatgcgccggccagtactgattgccgaaggcgttccagatggcgtactcattatccgccaccaccgggtaggttatccgccagtccttcaccgcctggcgcagcaggggcaacgaacgctcccagggatattccggggtatgaacgccaatcaccaccaggcccgccgcgcggtatttgttcgcccagtcgcgcacgtaaggcagggtatgctgacagttgatacactcccgggtccagaaatccaccagcaccactttgcccttcagacgctccggagttaacgccgggctgttgatccatgcgctgccccccgccagagagggcatcgcgctgctgggctgcggcgcggcgatcggctggaggctggtcttttgctccggctgcggcagacgggcggccagccgctgctccagcgcctggctcagtccaccagcgctttgcagatagcgatcgccgccgctggcgatcagcgccaccgaggccagcattgccccccctgccaaccggcgcagccgttcgccgaacgcctgtccgcgacgcaatctggcgatcaacgccgccccgcaccaccccagcaggaataacatcagcgccccgccgctgccgtaggccagcagcaagccgccggtagtcgcctgccccggatgcacaaagcccaggctaagtatcgcccccaataccggcccggcgcacggcgcccacagcaggcccaccgccagcccggccagcagagaaccgatccagccgcgctggcgtgaactggcatcgttaagctgattccccaacgctaccaggggtgaggtcagccgttgcgcgacgcgttgcgaaagcagactcagcccgaccagggcgaagaacgccagcgccagaccgcggcctgcaagggtcagattcaccacccagccgctggcgaccgtcaccagccaggagacagcgccgaacatcagcgccattcctgccagcatgatcgccagctgcccccggcggccccggacgctggcgaacagcagcgggatcaccggcagcgtacaggggctcagcagggttaacattccgcccaaaaatgcaattaatatcgacatcgccttctcctcattatgccgtcgctgccgagagtggcagccacgacattacagcaaggccatgtaaggcgaatgtgtcgggaaagggggagaattgtcggcttagttatccgtctttcccggagatacagcaggatacaatcccgccgcggcaaggcgaacgctggcgtccaggccgccctgcgggcggttggccaggcgcagcgcgccgtccatctggctgaccagctgcgcggcgatcgccagccccaggccggtgccgccggtatcgcgattgcgcgagtcctccaggcgataaaacggctgcagcacctcctgcagcgaggcctccgggatccccggcccctcatccagcacatgaagggtgatatcccccacggcgtcacgggtcagggttaccgtggccgtcgtaccgaatttcaaggcgttatcgataagattggtcatcacccggcgcagagcctgcggcgggatccacaccaccccggcggtctcttcgggacaaaactggaccggccggccgacatcggcataatcgcagacgatggtgtcgagaaacgcatcgagattcagccgctgtcgcgcctcctccagcggctgcgaggtgcgggcgaaggcgatgccctcccgcaccagacgggtcatattgtcgagatcctgcagtagcttatcgcgcagttccggctggtcggccatctccacccgcagcttcattcgggttatcggggtttgcagatcgtgggagatggcggcaaggatccgcgctcgctcctgcagatgatcgtggatgcgcgcctgcatcgcgttaaacgcgcgggcggcgcgacgcacctcctccggcccctgctcggccatagttcccgccgtgtcgctggccggctccagggcatttaccgcgtgggtaaagcgggagatgggcagcaatacctggcgaaccgcgtaccaggcgcaggccagcaggaggacaaactgagcgatcagcaccaccggcagccagcgggcgatggccggtagtttcggccacaggtcgagggtcaacggcgcgccgtcgtgaagggtaatatgggcctgaatatgctgccgcgggccggggatcgccacaatacttaccggatactgcgcgctcagcgcctcctgcagggagcgcgctgcgtcccgggcgcgccagctgtccgggtaatcgccgcgctccccggcgtccagcagatagcgataattgccgcgcgccagcttcggcagccattgtgggcgctcagcggccggcaggcggtcaaggatcgccacgctggtggcgacatcggaagccagattgcccagcatcacgctgcgagcgctgctcatacgctcataaaacagcagcgacagggttaaggtattcgccagcagcagcgccagaaacagcagcgccatcagcctcgactgcagcgaggcgggccagaacctcattcatgcctctcgcgaatggagaccggtaccgacagcacatagccttcgctgcgcaccgttttaatgtaggccggctcgcgagcatcctcccgtagccgctggcgcagtcggctcaccagcaggtcaatcgaccgctcaaacagttccgcgtcgcgtccctgggtcagattgagcagctgatcgcggttcagcacccgctggggatggtcgagaaacacccgcagcagccgatactccgccccgctgagggcgacaatcgccccgctgtcgtcaagcaaatggcgagcggcagtgtcgagcagccagtcgccaaaggcgatcagcctgcccgcctcggtgatctgcaggttgggcggcagcgcccgggtgcggcgtaaaatagctttgatgcgcgccagcagttcgcgggccacaaagggcttaatcagataatcgtcagcccccatttccaggccgaggatccggtcgctgtcatcggtgcgggcggtgagcatcagcaccgggatatcctgctgcgggttggcgcgcagctggcgacagagcgttaagccatcctcgcccggcatcataatatccagcacaatcaggtcaatttgatggtttttgagtaccgaccacatggctttgccgttcgccgcgccgctggcgcgatatcccgatttttccagatagtcgacaatcagttcccggatgtcgcggtcgtcgtcgacgaccaggatgtggtcaatacgctccaaaggctgctcctggggcaaaataaactcttcacaagcataagccgtgttgccggaagcgcaacgtcgcgccgccggcaaggcgccggttacaaacgatcggcgtccaccaccgcctgcacaaacgccgtcggatcctcctgcggcgggttatggcccaccgctcccggcagatcccggtgctcatatttaccggtaaatttggcacggtagctggcgggagccggatgcggcgcgccgttattcgccccttccagggtgatggtgggcacggttatcggcggtagcgccgccagccgttgttcatagccggcatacttcgcttcccctttctccagccccaggcgccagcggtagttgctgatggtgatcgccacatggtccgggttatccagagcccgggcggttttggcaaaggtcgcgtcgctgaattgccactgcggcgacgcctgatgccagataaatttcgcaaagtcgtgggtgttttgccggtaaccggcctccccacgcggagtggcaaaatagaattgataccaccacgacagctcagcctgcggtggcagcggtttttcgccaatctgctgactgctgatcagatacccgctcaccgagaccagggatttcacccgctgcggccacagcgcggcgacgatatccgccgtgcgcgcgccccagtcaaaaccggccagatccgcctgcctgatgttaagggcgtccatcagatggacaatatcggccgccatcgccgacggctgaccgttacgcggcgtgctggcggagaggaaacgggtagtgccgtagccacgcagatacggcacgatcacccggtaacccttctgcgctagagccggcgccacctgggcatagctctgaatgtcgtagggccagccgtgcagcaggatcaccggctggccgtcgcgtgggccgatatccacgtagccaatattcaggtcgccggcgcggatctgctggatcttgtcgaacgcccccgcgtcttcagcggcgcaaacggcggcggaccacagggtggataaccccagcgccacggcgctggtatagcggatcagggataatctgttcatcgttttctcaccttttatcgtcatcaagagagtacgtgaccagtaaagcggaaatttgtatccgccatgtgcccgaccggggccatttttatctcttaatgtcagcgctgcgccgcgagatacagtgtgatacaaagtcgaagttggcaattgttgcgggcatgtgaatttatgcttgccccgggagataaatccgttaccgtggcaggcatttttcaccacttaagaacgcaggaacccgctatggcgatttttgatggtcacaatgacctgctgctgaatctctggcttcaccatcgcgaggatccggtgagcgccttctttgccgggattgagaacggccatctcgactatccgcgcatgctgcaaggcggatttgccggcgggctattcgcgctattcgtgccaccgcaggaatatattgcccgtatgacgccgcaatacgccagccaacgatgggatccgatcgatatcctctggcagcaactggccatcctgaagcaacttatcgcgcactccgctggacgcttgagattgtgtctgagcgcggcggatatcgaacgctgccgcgaggataaggtactggcgatggtggcgcatattgagggtgccggaggttttgatggcgagggccgcgacctgcaggccttttatgccgccggggtccgcagcattggtccgttctggaatattgcgaaccgcttcggcagcggcgttaacggttcgtttcccggtagcccggacactgggcctggactgacagcggcaggtatcgatctgattaagcaggccaatgccttgaagatgcagattgacgtgtctcatatgaatgaaaaagcgttctgggataccgcccatcactcaacgtcaccgctggtggccacccactccaatgcccacgccctgtgcccgcagccgcgcaatctgaccgaccagcaactgcgggcgatccgcgacagcggcggcgtggtgggcgtcaatttcggcaatgctttcctgcgcgccgacggccggcgcgatagcgacacgcccttaaccaccattgtccggcatatcgactatcttattaacataatgggtgaggatcatgtggctcttggctcggattttgacggcatcaccctgccggacgagctgggcgatgtggccggcttaccgcggcttatcaatacgttgcgcgctagcggctatgatcaattggtgctggataagctgctgtggcgtaactggctacgggtattaaaaaatgtttggcaacaataggttatattgtaaacataaagttaattccttacagattccgggttgatctctctcccggtgaagcgcaatatgcggcagccgtcacagatccaccattatccgtgaggcctgtagtcatttttaagaggaacaaaacatgtggaagaaacctgcttttatcgatttacgtctcggtctggaagtgacgctgtacatttctaaccgttaatcgccccgcccgccgttcgcgcgggcaccttcattcattacccggtccgtcttcatgttcattaaagtcctcggttccgccgccggcggcggtttcccgcaatggaactgcaactgcgccaactgtcagggtctgcgcgatggcaccattcaggctgccccccgcacccagtcgtcaattatcgtcagcgacaacggtaaagagtgggtgctgtgcaacgcctcgccggatatcagccagcagattgcccatacccccgagttaaataaagccggcgtactgcgcggaacgcatatcggcggcattattctcaccgacagccagatcgaccacaccaccgggttgctgagcctgcgggaaggctgcccacatcaggtctggtgcaccccggaggttcatgaggatctctccaccggcttcccggtgtttaccatgctgcggcactggaacggcggcctggtgcatcatcccatcgctccgcagcagccttttaccgttgacgcctgtcctgatttgcagtttaccgcggtgcctatcgccagcaacgcgccgccctattcgccgtatcgcgaccggccgctgccgggtcataacgtggcgctgtttatcgaaaaccgccgcaacgggcagacgctgttctatgccccggggctgggtgagccggatgaagccctgctaccgtggctgcaaaaagcggactgtctgctgatcgatggcaccgtctggcaggatgacgagctgcaggccgccggcgtcgggcgcaataccggccgcgatatgggccacctggcgctcggcgacgagcacgggatgatggccctgctggcctctctgccggcaaaacgcaaaattctcattcatattaataacaccaacccgatccttaacgagcagtctccccagcgccaggcgctaacgcaacaggggatcgaagtgagctgggacgggatggcaatcacccttcaggataccgcatgctgatcactgacacgctgtcgccgcaggcctttgaagaggctctgcgggctaaaggcgacttctaccatattcaccacccttaccacatcgccatgcataacggcaacgcgacccgcgagcaaattcagggttgggtggcgaaccggttttattaccagaccactattccgctgaaagacgcggcgattatggccaactgcccggatgcgcagacccggcgcaaatgggtgcagcggatcctcgaccacgacggcagccacggcgaggacggcgggattgaagcctggctgcggctgggggaagcggtcggtttgagccgcgacgatctgctcagcgagcgtcacgtgctgcccggtgtgcgcttcgcggtggatgcctatcttaatttcgcccgtcgcgcctgctggcaggaggcggcctgcagctccctgaccgagctgttcgccccgcagatccatcagtcgcgcctcgacagctggccgcagcactatccatggatcaaagaggaaggctatttttacttccgcagtcgtctgagccaggctaaccgcgacgttgagcatggcctggcgctggcgaaggcctactgcgacagcgctgaaaaacagaaccggatgctggagatcctgcagtttaagctcgacattctgtggtcgatgctcgatgccatgaccatggcctatgccctgcagcgcccgccctatcacacggtcaccgacaaggcggcctggcacacgacccgactggtgtaatcatgcagaaaacgtccatcgttgcctttcgtcgcggctaccgactgcagtgggaagccgcccaggagagccatgtgatcctctatccggagggtatggccaaactcaatgagaccgccgcggcgatcctcgggctggtcgatggccggcgcgacgtcgcggcgattatcgccatgcttaatgaacgtttcccggaagccggcggcgtcgatgacgacgtcatcgagttcctgaagatcgcctgtcaacagaagtggatcacctgccgtgaaccagagtaaacccaccgtcaatccgccgctgtggctgctggcggagctgacctaccgctgcccgctgcagtgtccctactgttccaatccgctggacttcgcccggcaggataaggagctgaccaccgaacaatggatcgaggtctttcgccaggcgcgggcgatgggcagcgttcagctgggcttttccggcggcgagccgctgacccgtaaagatctgccggagctgatccgcgccgcgcgcgacctcgggttctataccaacctgatcacctccgggatagggctgacggagagcaaactggacgccttcagcgaggccgggctggaccatatccagattagcttccaggccagcgatgaagtgctcaacgccgcgctggccggcaacaaaaaagccttccagcagaagctgaccatggccaaagccgtgaaagcgcgcgactacccgatggtgctcaacttcgttctccaccggcacaacatcgaccagctcgataaaattatcgagctgtgcattgagctggaagccgatgacgttgagctggccacctgccagttctacgggtgggcgtttcttaatcgcgaagggctgctgccgacccgggaacagatcgcccgcgccgagcaggtggtcgctgactaccggcagaaaatggccgccagcggcaacctcaccaacctgctgttcgtcaccccggactattacgaagagcggccgaaaggctgcatgggcggctggggatcgattttcctcagcgtcaccccggaaggcaccgccctgccttgccacagcgcgcgccagctgccggtggcatttccgtcggtgctggagcagagtctggaatcgatctggtatgactcattcggcttcaatcgctaccgcgggtatgactggatgccggagccgtgccgctcctgtgatgaaaaagagaaggacttcggcggctgccgctgccaggcctttatgctgaccggcagcgccgataacgccgacccggtgtgcagcaaatccccgcatcatcacaaaatcctcgaggctaggcgcgaagcggcctgcagcgacataaaagtcagccagctgcagttccgcaaccgtacccgctcgcagctgatctaccaaacccgggacctgtaatgacgctggcgacccgcaccgtcattttgccgggcggcctgcaggccaccctggtccatcagccgcaggcggatcgcgcggctgccctggcgcgggtcgccgccggcagccaccacgaaccgtcgcgcttccctgggctggcgcacctgctggaacacctgctgttttacggcggagagcgctaccaggatgatgaccgactgatgggctgggtgcagcgccagggcggaagcgtgaatgccaccaccctggctcgccatagcgcgttctttttcgaggttgccgccgatgctctggctgatggcgtcgcgcgtctacaggagatgctgcaggccccgctgctgctcagggaagatattcagcgcgaagtggcggtgattgacgccgagtaccgcctgatccagcagcatgagccatcgcgccgggaagccgcggtgcgccacgccgccagcgcgcccgcggcgtttcgccgctttcaggtaggcagcgccgacgcgctggcgggcgatctcgctgcgctgcaggccgccttaggcgattttcaccgcacccattacgtcgcccggcgaatgcagctctggctgcagggaccgcagtcgctggaggcgctcggcgagctggcggcccgtttcgccgccgggcttgccgcaggcgagcctccgccgccggcgccgccgctgcgcctgggcgagttcactgcactgcagctggcggtctccagccagcccgcgctgtggcgctgcccgctgatcgctttaagtgacaacgtcacgttactgcgcgagtttttgctggatgaagcccccggcagcctgatggccagcctgcgccagcgccggctggccggggatgtggcgctgaactggctgtatcaggatcggtacctcggctggctggcgctggtcttcgccagcgaccggccggaagaggtcgaccggcagataacccactggctgcaggcgctacagcaaacgacgcctgagcagcagcaacactactatcagctatcccgccgccgctttcaggcgctgtcgcctctcgatcagctgcgccagcgggcattcggctttgcccccggcgcgccgcccgccgggttcgccgatttttgcgccgccctgcaggccgccccgtcggtcagcctggcctgtcaaaccgtttccccaggggagcctgttgccacccagggctttagcctgccgcttagccgctggcgccgccgccctgagtctgacccggcgctggcgttcgctttttatccgcaggccgctggcgatctcgttgccaaatgcccggagaaagccgcgccgctgctccatctcccgttaccggaagagccgccgaggctcctgctgcgaccgcccttctactgctcgcccgatcaggccgaaggactggcgcgtggggaacagctgcgcccactgcttgccgccctgcgccatgccgggggacacggcgagtggcatctgttcgacggcagctggcagttgaccctccagctgccggagccaggccgacggccggaagcgatcctgcaggccatcctgcggcagctcgcgctcccggtcgcctcgctgaccccaccgccggaaagtatcgctatccgtcatctcatggctcaactccccgaacggctgggtacatccgggcatcagaaaggttggctggcggccctggccggcggcagcgcagaagatgcgcagtgggtagcgcgtcagctgagcctgattaccgccccggttaatccgccgatgcccgctccggcaccctgccgccgcggcgtcgaacgtctggtttatccgggaggcgatacggcgctgctggtcttcattccgctgccggatggcgcctcgctggcggccctgcggctgctggcgcagcattgtgagccgctatttttccagcgcctgcgggtggagcagcagattggctatgtggtgagctgccgctatcagcgggtcgccgatcgcgacgggctgctgatggcgctccagtccccggatcgccgcgccggggaattgctgcgctgtggtaaagactttctgcgccagctggcccccatggatgaggcgaccttcagaccgctacagcagcgcctggccgctcagaaccgcgccagcaggccgccagaggcgcgggcgctgtccgccctgcgtcaggagtatggattaccagagctaacgccgcaggcggttgacgcgctgcgcgttgcagaggtggccgatctggcacgcgaaatgacccgccggcgtcgccgctggcaggtgctattcacgacaggggattaatggccggggacatccggggtcagaaaggcgctgacgaagcgcgtaaggatcgccgcgccctgcgggctctcctgcacctcgtcgtgtaaccgctgcgcgtcaataccttccgcctgcagcaccgcctcccggtggcggatcagcgaacgggctatcggcgcggtaaattccgggtgaaattgcgtagagaccgcgtgcggcccatagcgcacaatctggtggggatcgtgggcggacgcggccagcaccgtggccccttccggcagacgagtcacggtttgcaaatggctcagatgcgcaggaaatgtagccggcaggccgctcagcagcggatcatcgacaccccatggcgacagcgtaatggtttggctgccgctttcccgcccgccaggatgatacgccacctcgccccccagggcatgggccatcagctgatgaccatagcaaacgccgaacagcggcatgtcgatagccaccgcctgccggatccagtcggcggtccgttcgctccacgccagacgatcggtcaccatcgcccacgagccggttagcaccgctatggtctggttatccggcgtcggcagcggttcatcttcaaacacccgcaccgtggtgagctgcgtctgccacggcgccagcagcgtgcgaaaccagcgcggcagatcgccatgcgcctggcgaatggccgtcggcggcgtgccggtctggaccagcagtaatcggttacgtgtcacctttcctcctcgctccgggtcatgttcccgtaaaacactatgccgccgggaagacgatgggacaaataaccaattactatggacgatgcgcctgcggaataagtcctgtcgcttactgggcatcggcgctatcacgctgcggcacatcggctgccgccgaagatgcctgctgcgggacaaaaatatggtccaggatggcgcgcgccgtcggtccggccaccaccccatccccgccgccgttctccagaatcagcgccatcgccaccttcggatgctgataaggggcaaacagggtgtagaagatatggtcgcgcagacgcaccgggatcattttggcgttataggtctggttttgcttcaggctaaagacctgcgaggtcccggacttcgccgcgatctgatacggcgcagtatgaaacagcttatagccggtgccgttgggctgattcgccatcccatacatgccgttgcgcacaatgccccagtacggggatttcgggtcacccacctgcggcaggttcgccggctgctgataacgttccacatggttgccctgcttcatcgaatagagcagatgcggatcctgtaccttaccattgttcagcagagtggtaagcgccttcaccatctggatcggggtggcgatccagtacccctggccgatgccgaccgagatggtgtccccctgataccagggctttttatgcacccgctgtttccactcccggctgggcagcaccccggcgtactcctcattaaggtcgatgccggtggactggccgtaaccaaacttgctcagccattcatggatccggtcaatgcccatctcgaaggcgacctgatagaaaaaggtgtccgctgactcttcgatggctttagtcacgttgagcatgccgtggccggttttcagccagtcgcggtagcggcgttgcgtgcccggcagcgtccacgtcggcgccccgaagaaggtggtgttcggggtgatgaccccagcggagagcgccgacagcgccatatagggtttgaccgtcgaagccggaggatatagcccctgggtgacgcggttgatcagcggccggtccggattctccagcagcgatttataggcctgatagccgatacctttgacgaacggattaggatcgtagctgggactggagaccatcgccaacacgccgccatcccgcgggtcgaccaccaccaccgccgcccgctgtcccttcagcaccgactcaatatactgctggagatgaaggtcgagagtcagatagaggttttttccggccaccggcggcacctctttcagtagacgcaccacccggccgtggttatccacctccacttcctgatagccggtggtgccgtggagcgctttttcataatagccctcgatgccctgcttaccgatattgcggtcggcggcgtagttctcctcttcgccgtttttcgccagccgctgcagatcgctgtcgttgattttcgacacatagcccaccacgtgcgccagctctgcgccgtaggggtattcccgttgttggtagctctccaccgtcacgccggggaaacggaattcgttgaccgcgaagcgggccacctccacatcgctgaggtctgacttgagggtgaccgctttgtagcggctggtgtggtgcatatcgtcgcgaaagctggcgatgtcgtccggcgtcaggtcgacgataggcgtcagctgctgcaacagcgcggccatatcgggaattttgctcgggatcacctgcaggcgatacagggtgatattctgcaccagcggaataccgttgcgatcgaatatcagcccgcggctgggggcgatgggcagcattttgatgtcgttctggtttgaccgggtctggtaaaaatcgtgctgctccacctgcagatggtagaggttaacgatcagcacgccaaagcagaccaccaccagcagaaaagcaattgcggcccggcggataaacagcatctcttccgcggagtggtcgcgaatttcatctctcaaaaggggcattagcggtacatcacctgaatcactggaaaagccaacggcgtaacggccgggaagcatagccttatcgcagcgtcagccctactgaaaggttgctaatgatctggcagaaatgtttcagcatgttagagggatcgttattcttaaccttgcccgtgacgcgtcaggctatgttcacgatgcccgacgcgtcggcgcggctcactgttctgcgcgggccgcctcgtgggaggtagccgacttccctgaggtgtagattaagtacagcgcgagggccagacatatcaccgccgccagtcgcgccggcgagaacgccatcgtgctgttgcccagccagccaaagttgtcgatcagcaggctcatcgtcagctggccaaagatcaccgccacggtagccgtagcggtgcctatccgctgcaccgccagcaccataatgacgatgtagggcacgccgcaaaaagcgcccagcagctgccacttaggcacctgtaacaggtttaccgacgtcgctggagcaaaaaacaggatcagcaatcccgtcaccagcgcgccggtagcgaaggttaaaaaggcgctgcgcagcacccccacctggctgccaagacggccatttatcgccgcctggacgctaagcaatgcgccgccgcacagtgccagaatgatcactatcgtatccatttcccctccttaacccagagccaccagcaataacgccgccataatcaacatcagcgccatggcgcgccgcggatcgattttgcgccgtgggctgccgaataacccgtaatggtcgatcgccaggcttttcgccacctgccccgccaggatgccgatcatggtcatggcaataccaatcactggcgtcgccatggtcaagatcaccacgtaccccgcccccaacagaccgccggtgagttgccagccgggcagagaaaagaacgacgggctgctacgcgggctgaaaaagagcatcagaaaaaaggttaacactgcgccaatcccaaagatgctcatggttgcccacagatcccccacctggctcgccagcggccccagcaggccggcctcgaccgataatcccatgccgccggcaatcactaataaaatgaataataacgccattactgcgcctcctctgtacaacaggcggctgaggataaaacagcgtgctgatgcgataaacggtataatgcagaaaacactattgcaggaattgcacagatggccgatgccagcagcgtcgattttcgcgcccttcagcttttcatcgcggtttacgataaccagagtttttccgtagtggcccgccgcgaaggggtctctccctcgctgatctcgcgaaccatccagcagctggaagatgccctcgggcagcagctgttctaccgcaacacccgtgccgtggtaccgaccgaagcaggacgctttttcgcagcgtccgcccgcgaactgctgggacagtacgccgacgcgcaacgggcgttacaggatcgggcacaggtccccggcggactggtgcggatcaatgcgccggtctattttggtcagcgtcatatcgccccctggcttccggaactggcggcccggcatcccaaactgcagtttgacctgacgctgaccgacgattttatcgatccccatcgcgatgcgacggatatcctttttcgcatcagcagcctgccggacgcgggctatcacgccagagtgtttggcagccagcgctattacctgaccgcctccccggagtatgtttcacggtacggcagcccgacttcgccggaggcattgcatcaacatcgcacgctggtgtatggcggttcgcagggagccaaccgctggctgtttcgccagcgcgaagaggcatgggtgcactatccgttgaccccgctcatgacctcgaacaatgccgatgccctgctcacttcagccatcggcgggatggggatcgtgttatttcccgactggatggtcagcggggcgctgcacaacgggacattagtcacgctgatggatcgctattcggcggccatcagccacacgccatcgtatatcgcggcgatttatccttatacccgccatccctctctcaacgtgcggacagtgattgactattttgccgacgtgtttggatcgccgccctactggcagcgctaatgcgagattcgtagtaaaacttgtcatatctcaaacaattagcattccttcgcccagcttgacgcgaatcgtttcctttgccgcctcgttacggctatggttactaatgaggttaatctcaatctccaggccgacacggtcccaccagggggttgcctaacccttcattgaacggaaatagctattaaatccgtagattcattcaaatatcgcttattggtagcagtgtatatcgtaacggcattcacaaaagcaaacggagcctgatatgagcacgtctaacgacccatccaacaatgcatccgccgggaagtgccctttccacgccgagacgccaaaacagagcgccggcagcggcaccgccaaccgcgactggtggccgaaccagctgcgtgtcgatctgttaaaccagcactccaatcgctccaacccgttgggtgagaattttaactacagggaagagtttaaaaagctcgattactccgcgctgaaggctgatctcagagcgctgctgaccgattcgcaagagtggtggccggcagactggggtagctatattggcttgtttattcgtatggcctggcacggcgccggcacctaccgcaccgttgacggtcgcggcggcgcaggtcgtggacagcagcgctttgctcccctgaactcctggcctgacaacgtcagcctcgataaggcccgccgtctgctgtggccggtgaaacagaaatatggccagaaaatctcctgggccgacctttacatgctggcgggtaacgtcgctctggaaaacgccggcttccgcacctttggctttggcgccggtcgcgaagacgtctgggaaccggatctcgacgtcgactggggcgatgagaaagagtggctggcccaccgtcatccggaaagcctggcgaaacaggccatcggcgccaccgaaatgggtctgatttatgtcaacccggaaggtccgaacgccagcggcgagccgctgtccgccgcggcggccattcgcgccaccttcggcaatatggcgatggacgatgaagagatcgtcgcgctgatcgccggcggccatacgctgggcaaaacccacggcgccgcagaaaccagccacgtcggcgccgagccggaagccgcgccgctggaagcgcagggtctgggctggcactccagctacggcagcggcgcaggcgcggacgccatcacctccggtctggaagtggtctggacgcagacgcccacccagtggagcaactactttttcgaaaacctgttcaaatacgaatgggtgcagacccgcagcccggctggcgcgatccagttcgaagccaaagacgcgccggagattatcccggatccgtttaacccggagaaaaagcgcaaaccgaccatgctggtcaccgacctgaccctgcgcttcgacccggagtttgaaaaaatctcccgccgcttcctcaacgatccgcaggcctttaacgaggcgttcgcccgggcgtggttcaagctgacccaccgtgatatggggccaaaatcccgttacctcgggccggaagtgccgaaagaagatctgatttggcaggatccgctgccggcagcgacccatcagccgagcgcggaagatatcgccagcctgaaaaccgccatcgccggcgccggcctgtcggtcagtgagctggtctcggtcgcctgggcgtccgcctccaccttccgcggcggcgataaacgcggcggcgctaacggcgcgcgtctggcgctggccccgcagaaagactggccggttaacgccatcgccagccgggtgctgccgaccctgcaggcgatccagcgcgcctccggcaaagcgtcgctggccgatattatcgtgctggccggcgtggtcggcgttgagcaggcggccgctgccgccggcgtcagcgtcaatgtgccgtttaccccaggccgcgtcgacgctctgcctgagcagaccgacgtcgagtcgtttgatctgctgcagccgctggcggatggcttccgcaactatcgccgtatcgaaggcggtgtctcgacggaaaccctgctgatcgataaagcgcagcagctgacgctaaccgccccggaaatgaccgtgctggtcggtggcttgcgcgtactgggcgcgaactacgacggcagcaaacacggggtgtttaccgaccgcgtcggcgtgctcagcaatgacttcttcgttaatctgcttgatatggctaccgtctggaaagcggccgatgataacgcggagctgtttaccggcagcgaccgtaaaaccggcgaagcgaagtacagcgccacccgcgtggacctggtgtttggctccaactcggtactgcgcgccctggcggaagtgtacgcctgcgccgacgggcagcagaagctggtacatgacttcgttgccgcctggaccaaggtgatgaacctcgaccgcttcgatctgtaatcccctcgccccggctcccgccggggcgtttttcttataccgcccgcggcagctgttgcaggcgactccgcgttcgttgaatatcctccagttccacccctgccaccagcgtctccaggtcgcagcgggtcaccagcagcaggcggatctgcttttcgtacagcacatcaatcacattgataaagcgctgctgggccgccggccccaccgtagccaatggcggcacctcgtccagtagccagacggcatagctttcgcagagcgtcagatagtccatcaccgccgtggcggcctgacaaagctgggtaaaggtgaagtgcagcaacgcgggcgacgccgcggccgccagcagcgtgcgatagcctaccgtcagcgaaaccggttcgccaggcagcgacggcaggtcatacagctgacgctgttgtgcattcggattaacccacatccgcccgctgcagaaggcgttatcctggctcagatgccgttcgcgataatcctcctcgccgttcagcgccaccaccgttagatgggcgcggatcagcgcgatcgacggtaaaaagcgatcgtgatacagcggattgggcagcagcatctccggcgggtagtttgaggtggccagcagcacgataccgtgttgaaagaggtgttccagcaaggctttaatcagcatggcgtcgccggggtcatgcagatgaaattcgtcgaagcatagcaggcggcaaccggatgtcatctgcctcatcaccgtctgcaggtcgggcgctccgggggcattcagccgctggtgcagttcgcggaagaagtgatgaaaatggacccgccgcctggcggcgagcggcaggctggcgaaaaagtggtcgaggataaagcttttccctcgcccggtacgtccccagacgtataccccctgcggcctgcctgtcgtggacaccaactgctgaccgagggcgtcaaggcgggcgatgagtgacagctgatcgtcgtccagcgtcagacgcgcccgcgccgcctgctcggccatcacgcgggtaaaacgaaaatcagccgtcacctctgtgggaccagattccgagggtacacatccattatttaacattcttataacctcctgcgaggaggccattctagccgctttcccgcgggatggcgaatcgcgcgacgagcggccgtttccgctgctccgccgccagcccctacgcctctccgacacgccagtgcaccgatgtgacgttctgctgaacgcccatctgcgccataatttgcgccagcgttttttggtgctgcttatggctaatcagctgcgcgcaaatctccagatggtccgcggtgtccgctgccgccgactgcaatccctgcagggtaaaccgctgctgctgcgcaatattcagcaacagctggcgtacagcattttcatgttcgcgcagacaggtgacgcgtaagacatagcgtttctcttcgtcaccggcccccggcaaggcatgaatgcgctgcgccgcctcgcgcaacaggatattggcgcacagaataatcagcgtagccgccgtcgcgttccagaactgtcccaggccgcagagtacgccgatcccggccgaacaccacagcgtggcggcggtattgaggccgcggacgttcataccatcgcgcataatcacccctgccccaaggaagccgataccggagacgatctgcgccgcaatacgccccgggctgtccggcgaggccgacatcgcgctgagaataaacaccgccgcgccggtggccaccagggcattggtgcgtaaaccggccatacgttgccgccactgtcgttccgcgccgatcagcgcccccaacaacattgccgcgagtaaatgagtcatataaggaaataccatcgcgccttcctccagaaaacagaaagccaaaaattacagatgtagcgctcagccgcgccgggcgattagccggtggatgatggtggaggaaataagggtctggaaaacataaacataacgctgcctctcgcgctcaatggcgcataaattattgagggaggcaatccggaactgagagattgctgcccgccgggacggcaagcagcgaaatgatcgcgttagcttgccggaaaatcgcaataagggtgactgtccaacgtatgactcctgaataaaagtgggcacattatagccctgggtaatgatgggtaaagcacgaaaacgccgccggtgacgattcgtttagtttgtctttcgcgggtcctgcgtagcgtgacatcgccaggcgactaaaatgccgtcagcggtgatttacttcaattccgtcgctgggatgcggcgaaaaccagcatgaatatcatctttatgtctccccagcgcgatcttacgctaaagaatgtcgctaaggctaaggattaaaaatttaaaactattaacaatcaattaacattagcaggcaaaccattcttcctgaggaacacaacaccatgtctaccacccaggttctcggcgaaacgccctatgcttcgccaggacaaccgcacgccagcttaaccggacgcattgatgcgctgcccgcctcatttgggttatggtcgtttattaccctgctctcacttggcggcttctttgagctctacgatctcttccagaccgggtatatcagcgcgggcctgctggcggagggcattttccacaccggacaggcgggcatcttcggcatcgccgaccaggcggccttcgcctccgccacctttatggggctgtttatcggcgccagtctgctggcgccgctggcggacaaactgggccgccgcctgacctttatggtggcgctcgcctggtacggtcttttttcgctgctgatggcgacgcagagtagcgcggaaggggtgatcttcttccgctttctggtggggatcggcctcggcattgagctggtgaccattgatacttacctcagcgaatgggtgccaacccatctgcgcaataaagcctttgcctttgccttcttcatccagttcctctcggttccggcggtggcgctgatgtcctggatgctggtgccgaccaccctgttcggcctcagcggctggcgctgggtgatcatctttggcgcactgttctcgctggcgatctggtttatccgcaaaaagctaccggagtcagcccgctggctggaaagcaaagggcggcatgatgacgcgcatacggtgatgtgtgagatggaagcccgctgcggcctgacgccgtcgccgaagcatgcgcatgcggcacagagcgtcgtcaaacgcggcaccttccgcgaaatctgggcgccgcagtatcggcagcgcaccctgatgctgatggtgatgaacttcttccaggcgatcggtttcttcggctttggcaactggctgccggcgctgctctccggtcagggcgccagcatcacccatagcctgctgtacgccttctttatcaccctcgcctatccgctgggctgtctgttctgcacccgcttcgtgcatcgctttgaaaacaagtggcagattgtcctctccgcgctgatgaccgttatcttcggcaccctgttcgctctgcaaaacagtccgatcctgttggtgatctgcgggtttatgatcacctggtccaacgcctggctgaccatcagctaccacgcctaccaggccgaggtcttcccgacccatattcgcgcccgcgccgtcggcttctgctactcgttcagccggctctcgaccgcggtgaccagcattctgatcggcattattctgcaatacgccggcacgccgggagtaattagctttatcgtcgtcagtatgctgatggtgatgctgtcggtggggatcttcggcccgagaacgcggggcattcgtctggagaatatctgatggcggtcgccgccgagggtgccggcggcgacatattttatcagttgcgatgttgcagctggcgctgaacctcaataagctccgcgatcaactcccgcgcaagcatagaggtcattatatgatcttgggcatgtaccagaataagattaaccggtactttgccacagccctcatccataccgataagcatggtttgtacatcatgcgcgcgttttgcggcatctgcggcgtcctgcatcagcctatcaacgtcctgccacactctttttctggcggcttgcagcgcctgcatcgccagactgcgggactcaccggcgttaatgatgagttccatgacggttgcttccatatccatacggtttccctacttgttgagtgaatgacggctgttgccatagttaatatttgtgatgtgtactgcaggagggataaaaaattgtcattaaggcttgtaacttctggacagcattaagcggcgccgcaataccgcttttaccaacggtccagcatcaccggggctatattgacactctcccatcagaggggcgtttaggcattttagtgacaagccgccaggtcggcggcccggcctcagccaaatatcccctgcgcctcggcgaagcatttttccgccagggtcgagactggttcctgctggcgcataatcagcgccagctgtgaatcaacatgggtttcggcgatcggcagaatttcaagattatcgcttagcgcttcgaggccgttgttaagcggcataatggcgcagcagatccccgcctgcaccgcctggataatctgaaacgtcgaatcactttcaaagacatacctcggcgttagccctttggccttaaagctgatttcaatcgattcccggtaatacatccccttggtcagaaagccgaggggcagcgtcgccagcgtctcccatcccggcgtcccggcgctgaagtcgaaatggcgtttatcgtgcagcagtcccatccgggtttgcggcaagcgagcaatcttgaactgaccttcatccagatgctgcagataacagatccccagatccagctgattacggctgacgccatcgataatctgctccgaggtcatcgacaacaggctgaactgcagcgccggatatttctccgccaggggtttaatcaactgcatcggattgaggctcgccagcggcaccataccgacccgcagctggccgaccatctgcccgcgacagatggccgcctctgccgccaggccgtcatgggcggccagcaccgcccgcgcccaggccaggatccgctctccctccggggtaaacccctcaaagcgttggccgcgctggatcagcgtcaggttcagctcctcttccaggttacgaatgcgcatggagagcgtcggctgggtaatatgacaggccgccgccgcctggccaaaatggcgcgtctgatcgagcgcgatcaaatacttgagttgcttaatatccattctctttcccgtttgaaccccgccgttcacccccggggccgcgcacaggttaccagaatgttagtttcgctagcgataaattcaagcgaggacaccacgaggtgctgcggggcgcaggacggcgcaacgccgctctgcgctatacctttttagcgcccgccgaccagcggacggatctctttcgagcgcagcgtcaggcgaacgggaaccgacttatacgaaggggtgccgctctcttcatcgagatagttcagcggcaccagcacgttggcttccggataataggcgccgacggtgcccggcgcaatgccgtaggccaccaccgtgatatcttccagcgtcagcgcgcttcccggcagcgcggtatgaatatccacccgatcgccatgctccagaccctgggcggccatatcctgctcgttcataaacagcacgtcgcggcggccaaagacgccacggtagcggtcatccatcgcgtagatggtggtgttgtactggtcatgactgcgcagcgtcaccaggcgcatcacgtcctcaccctccaccaccacgttctcatgcacccctttaaataccgagaacatggctttaccggtggcggtaggccagatgcgctcggtcggcggcagcggcatgcggaagcctccaggatggcgaatgcgctggttataatcctcgaacccaggaatggtctgttcgatcagatcgcgaatgcgatcgtagtcttccacgaggtactgccagtccactttgctggccggcaaggtggccttcgccagaccggcgacaatcgccggctccgagcgcagcatcgacgaggcgggcttaagcttgcccgacgaagcatgcaccatcgacatcgaatcctcgacggtgatcgactgccggccgctggcctgcaggtcaagctcggtgcggcccagacacggcagaataaaggtctctttcgccgtcaggagatgtgagcggttgagcttggtggcgacgtgaacgctgagctcaaggccgcgcatcgccgggaaggcgcgttcgtggtccggcatcgccacggcgaagttgcccccaaggcagatcagcgctttggcttcgccggcgatcatggcctccagggcttttaccgcatcgtggccatgatgccgcggcggcgtaatccccatcacccgctgcaggctgtcgaggaaagccgcggagggtttttcgctaatcccgacagtgcggttaccctggacgttcgagtgaccgcgcaaaggacagatcccggcccccggcttgccgacattgccgcgcatcagcagcaggtcggcaatcagacgcacgttggaggtgcctttgttatgctgggtgatgcccataccgtaggtgacgatggtggccctggatttggcgtaagccgccgcaacctggttcagggattcgcgcgtcaggccagactcctgttcgatgtcctgccagcgggtggcgtggaggtcatcggcgaaggcggtgaatccctgggtatgttgggcgataaacgcgtggtcgagcacattgccctgctcctcctccagctgcagcagcgctttggcgatccctttcagcgccgccgcgtcgccgccggcccgtacctggtagtaggtcgaggcgatcggcgtcgagcgccgggtcgccatctccattacgttctgcggatcggcaaaacgctccagcgcccgttcacgcagcggattgaaaacgataatcggcacgccgcggcgggatagctcatgcagggtgcccatcatccgcgggtggttggtgcccggattatggccgatggagatcaccagctcggtctggtcaaaatcgtcgagggagacggtgcctttaccaatgccgatcgactgtggcaggcccacgctggtggattcatgacacatgttggagcaatcggggaagttgttagtgccatactcgcgggcaaacagctggaacagccacgccgcttcgttggaggctcggccagaggtgtagaattcaacctcatccggctgcaggccgcggaggatctcgccgatacgggcgaaggcttgctcccacgccaccgggcgcagggtatcgctgtcccggtcgtaaaccaaaggatgggttaagcggccgtagccctccagttcaaaatcgctttttgccagcagggaagaaacggtatttgccgcgaggaatgcgggcgtcacccgtttggtggtcgcctcccaggtcacggctttggcgccgttttcgcaaaactggaaggtcgatttatgttctttatccggccaggcgcagcccgggcagtcaaaaccgtccggctggttggtacgcagcagcgtggcgggcgcctcaaaggcatccatctgggtgcgcacggcgatggccgtggccttcaacgcgccccacccgcctgccggaccgtcataggggtgaacaccgggaaccgcgcgtcttttattggtcatctctttactcctgctgctctgttctggctgtcgctagccgaaaaaggcgtacgacaaccccggcgacgaagcgtgaatcgcatggcgtcacctgaaaagaatgctgtttctcaaggatagtacgatgggaaagcgtaggtactgcgtttgttaactgaataataacatacacctcaattctgtataattgatgttatctatcaggtgttaaatttaacttatttgcaaattttgcggttttcaccgcggtgctgtgacggataaattgctacggaaagtgatgaccgggcagcgaaaccgcccggtgggccaggctcaggtcagattgaagtaacggtccggacgcagcgtctccggcagcggatgctgaccggtcatgtcgagcagattgcgctcgatggtattgcacatcgcgttcaacggcaggtcattggctgcggtgccgaacggatcttccagctcttccgccagcgaatcccacgataaaaaggtgtaagagataaagaccgagacaaacggcgtcatgtagtgcagatcgccgaccagggcgaacggcagcagcgtacagaacaggtagacggtacgctgcaggatcagggtataggcgaaaggcaccggggtggtggccagcctttcacaaccgcccagcacgtgcgccagctcgtcgagtttgttgtccatcagcccgtaagtgatgtcgctgagcttgcccgcctcccgcagctggccaatttcgttgccggccagcagcaggatccggttggtgggcattgagctggcgaggatctccgtcaccctctcctccggtagcaaccgccgcaggtcagccgtcggatcggttttgcgcagctggtgcttcaggctccagctaaaggccaccagatagctgacgatgcggcgatgtgcatcgtgttccgccggcaggatattgcgcagctgacgcaccagcgtgcgttcggcgataagcaccgtcccccacagattgcgcgcctcgacgaagcggctgtagctggcgctgttgcgaaagccgaggaaaatcgcaatcgcaatccccagcaggctgaacggcgccacggttaagtggatccccagctgttcgtaccattgatagctgataatggcgatgatcgacatcagcacatttagcagcaggcgaaagatgattttcgacagcacggagccgtgccagtcaaataggcgaagaaaccagtgttgttctggccgaatgatcattgtctgacttcctgaattaccgctctggtcattatctctgaatacagaatagagattatctatgagccgattggtttattttatcgttaactgcgatgggcagatctgcgccattatttagcgatggtaatggcgtttttagtatgggccttttttatatttcaggcaatcaatgcgccagcaataatggctcagaagaaaaaataaccgctgagccaattcatttttccgcttatgctaccgggtgtatcagaccgctttcgtcaacccctgcgcttcgcagggatcgagatgcaccatcacattaagcaccggatgctgcgccagcacccgctcccgcgcgtgacgggcaatctgatgcccttcggctaccgacatctcgccagccacctcgagatggacatccaccagcaccagatcccccgccttacgggttttcagatcgtggaggcccgccacgcccggcgtggttcgcagcgtatcggcgatcgcctgctgcatctcttcatcaaccgcacggtccattaaatcatgcagcgcgctgacggcgaaacgatagcccatgcgcgcaatcagcagccccaccgccagcgcggcgagcgggtcgaaccaggcgaacccggccagattaccgataatccccagggccaccaccagggaggatgcggcgtcagagcgggcatgccaggcattggcgataagcagcgacgaattcagccgactggcggccgccagcatatagcgaaacagcccctccttgacggccagcgccaccagcgccatccacagcgccgcgctgtgcaccggcggaatagtttgcggttgcgcgagatggcccgccgcggaccatagcatgccacccccgacgagcagcagcatcgcgccgatgattagggaggcgccgttctcatagcgccagtggccatagtggtgatcgtggtcagacggtcgacggctctttttattcgccatcaataccacgccatcggcgaccagatcggaaaaagagtgcattccgtcggcaattaatccctgagagccggaaaatattcccacgactacctgtaaggcagaaaggaaaatattaaccaccacgctaacaagggtactctttcgcgcctgcaccgaacgctcatgatatttattatcattttcaaaattatgttgtgtcattatttctctccctttgtgagcgggaagaataaactgacaaactgagtttatgcttaacaatataaaagccattgccttgccgtttaacgatatcgcggcggtcggtaatgactatttactgtatgtgccgttggaacgctgcaaccttgcgcctatgaactatcttttgaagggtggccacaggtcgggccactttagcttagccaccacaggagtcagcgatgtcacataacaaaccatcccggctgcgtttcgccattaatctgggcaatgcggtcctggcccatctcggggagacaggaaagcccgcgggcatcaccgtcgagctcagccatcggctggcgacgcgctggggcgtcagcgccgaattcgttccctatcctgccgcgggtaaagtggtggctgacgccggtggcgagcactgggatattgcctttctggccatcgatccggcgcgggaagccaccctgcgctttacctcgccctatatcaccatccagggtaccgcgctggtcagcgttgattcgccctgccagagcgtggccgacatggatcgcccggcaaccaccattaacgtcggacaaaacgccgcatacgatctatggctaacccgccatctgcagcacgccagcctgcatcgccttccctcttcgcaggaggcaatcgacgccttcctcgccggtgaaggggatatggtcgccggcatccgccagccgctggaggcgacagcccgtcagcacgccggggtgcgggtactggcggataattttaccgagatccagcaggccatctgcgtcgcccgggcggacgtggaccgttttcacgcggtaaacgacgcgcttagcgagtggcgggcggatggcagtctgcaggcgctgattgccggtcacctgggccaagcgaactgaatcacgcctccgtcatccggcgcatggcgcaatgccaggcgccgttgcgtaccgaggcgcgcagtacgcgggccacgccatgcaccatcaggcgcgtcgtgcgccgctgcagcggcgtgagcgacaatcccagcatctcctgcgcccattccggcaggaggtcaattcctgcgttcatcatcacccggccgaccggctggctcatccgccccggcagacgggtggagagcagcacctcggctacctcccgggtacgttcgtcgcagcgcagtcgcgggcgcatcgcctcgagatagtccgccacctcctgcggtgtctgagggatatcccgagcccccagccgccgggcgatttccgccgactcacgaaaatagtcctcctggcgctcgggactgaccaccgtccgcttgtagcgcaggtgggaggccataaagcaactgcactcggcgacgtgcacccaggttaacagcgccgggtcgctcgcctgatacggggttccgtccttatccaccccggcgatccgctgatggatcccctgtactttggcgattagccgttcggcgtcgggggtagtggcaaaagtggtggcagaaataaactggctggtgcggcgcaggcggcccaaaatatcctcgcgaaaacgagagtgatcccagacgccggccagcgccagaggatgcagcatctgcagcaacagcgcgctaatgccgccgcagagcatcgaggtaaaatcgccgtgcacctgccagatggccgactggggaccaaacagccccggctctcctttgggtcgttcaaagtcgatctcttttagcgccatgccggtcaggccgagcacctgcgcctcgatcatccggcgaatgccgatcatgatggtatcccttacgtgcaactaaaggacaaaagataccactgttggacagcattgggagagatattgcggaaagagtgcccgcagcacgcgggcacgacggcttacggattcagctggtaatcgagggtaatgttggccttcagcacctgcgataccgggcagcctgctttcgctttctggatgatctcatcgaacgccgccggagacacgtccggcaggacgatctggctttgcagcgcgatatcggtaatcgcaaagccgccgtcggttttattgagggtgaccactgcggtagtgtcaatggacgttgcggtatatccctcttcgctgagcatcagcgacagggccatcgaaaagcaggcggcatgtgcagcgccgatcagctcctcagggttggtgcccttcaccccctcaaaacgggtgttaaatccgtagggctgctggctcagcgccccgctttctgtcgacacggtgcctttgccatgcttcaggtcgccttcccagtgcgctagccctttcttatgaatcgccatttgattcctcctgtagtgatgtcgaacaaaaagtatagtgcgtgatgccgaagctgcgtcttttcgcagcctctggcccccacgttcccctggttttcgtgtcgttggtgacgctatcggccatcctgcggatgccagggatcggatttgtcatccttgctgtcgtcccgtttacgcggaacttcgccctgctccccgggcgcctcacgggcaggttgcttaccgcgctcttcgtcttgcgagtgagaaaaggtgctcatatcgacgtgctccgcttacttaggcgactgcttgagcagacgatcgattcgcacgaccggcggcgtcattttgcgatccagactgccgttgatattgaccagatcgtctggctctacgtgttgttcgttaaacgcggcgaccgggataataacggtgatggtgccgcttttatcacgaaactgataacggtcatctccctgccgcttgagcagattgccgcgcagcgaaacggtcgcgccatcgtgcatggttttcgcctgctcaacggtcatgatccggccatcctcgacgccgcgatagccgtcatcgagtttgtgcggcggcggcggcgcggcatcctggctaaaccctcccttatcgtccgcctgcgcgacacctacggcaaacagacatgccatggccaatgctagttttttcatcatgcctccgttttttgctgacgatgagaataaagcctggctgaggctggccatttttacaaagtcaattgttctgatatcgtctaatataagaatgtccttatcgttacgctcctggcgaaacgaaacgcggggaaaatattaatgattaagaatcaacagccttgtcctatcgtcgatgagaatgaacgctccttacgctttgaatatcgcttccgccgctatgggataattgttttgagtctcatcattcttaccgcgttaagcggcctgtggtcctccggttatttcagtgaagcacacagggaaaccggcggaggcgaattaagcgtcgattatcagcgctatgccaggctgatgagtgaaaccgagcttaatattcagattaaaccggatacggccagtgacaccattatcagcttcgccgccccgttattaacccgctaccagatcggtgatatccgtccgcagccggataaaatgtatagcgccgaggggaaattacatctcgtctatcagcggtcgaacccctcttcaccgatatctgtgtggttagccgttaccccaaaaacggccggtaatatctctctgcaggcggtagttaacgatcgctattctgtaacctggcagcagtttgtctatccgtaggagtcgctatggaaatggtccttagagccgcagcaatctatctgatcctgttgattatttttaagattgccggcagaagaaccctgatgcaattaaccaactttgacctgatactgttgctgattatcagcgaagccacccagcaggcaatgctcagcacagactattcggttaccgggtcgatgctgactatcgtcaccctggttagtattgatattttgttcggctatattaagaaaaaatttgctcaggcagaaaattttctcgatggtacgccggttatcgtggtggaaaatggtgctgtcatcgacgagaagattaagctcgtcaatatctctgtcgatgatatcctgctggcggccaggcagcaccatggcatttatgaattgaaagcgatcaaattcgctattctcgagcgtaacggccagatatccattattcctgagcaggaatagtatcggcttcgctatttatcacgctccggttgtttatcacctgattccggagcgcgagtggcgtcatcctcttctttttcatcgttaacaacgttcaacattaacatttttcctcctcgctggttgtcagggatcctacaaattatagaacgccttcgccgaagtatgtaggatctgccgaaactaaccaggagatgccgcctgattcacattgcgcttattccaggatatttcccacctcgtcattgccattggtgagaaataattaaccgatccgtacagtcaatattgtgaaagccaaaacataatgaggtcactatgtctgtgatggttattaccggtggaaccgcgggagcgggcaaagctaccgcgctgcgtttcgcccgcgctggatatcacgtggcgctgatcgcccgagacgaaacgggtttgcaggagacgcgacaggcctgtgaacggtttggcattaaaacgctggctattagcgccgatgtcgtcgatgccggggcgctgcagcgcgccgccgccgaggtggaaaccaccctcggggcaatcgacgtctggatcaacaacgccatgaccaccgtgctggcgccctttcgtcagatgagcgaggaggagtttcgccgggtgacggaggtgacctatctcgggtacgtgaacggcacccgcgcggcgctggaggtcatgatcccccgggatcggggggtgattattcaggccggctcggcgctggcctggcgttcaatcccactgcagtcggcttactgcggagcgaaagcggcgatccgcggctttaccgatgccgtgcgaaccgaactgatgcatgagaaaagccacatccagttgaccatggtgcaactgccggggatgaacaccgcccagtttggctgggcgcgaaacaaaatggatcaggccatgcagccggtgcccccggtctatcagccggaagtcgccgccgaggctatttacagcgtcatccagcgcccggtcaacgagctgtgggtcggaaaaagcaccatccagtcgatcctcggccaggtcttcttccctcgcctgctcgatcggctgatggtgaaaaaagcgtgggagggacagtttaccggtcagccaaagtcgtcagaccaacaggacgacctgttcacgccggtgcgcggcaatcatccgggccacggcccctttaacgatggcgcacggcgtaaagcagtcaccatcagcgccgatctcccgggtaaagtcgccgccggcgtcggggtagcggtggcgacgatggcgctgcgggcgttgttccgtcgttccggaaaacggcgctaactcaggctgcggctgaaccaacggtaaccatacccggagagtgccagccgcgcatctttcccgccgtgcagcccatcctgatagagcttatcttccagaattgggctccagtagccctcggccagcggcgggagcaggacctctaccgcctgctggctgcagttggccagcatcagtacctcccgcgattcgctgcgatagagcaagcccagcaccgcgtcgggctttagggtaaggagagtaaaagggagtgatcccggttcagtatattccgtgcgcgccaataccatattgcgtacccgatgcagcagcgacctgggatggcgcagcgccgtttcgacattgatccgttggtagcggaaccgcccgctggccaccggttttaccggcaaatcatcccgcgccgcccgggaaaagccggcgttggccgcggccgaccactgcatcggcgttctgaccgcgtagcgctccggtaaggagagatcatcacccatgccaatctcgtcgccatagcgcatcaccggcacgccgggcagcgccagcaggatagcatgggctaacgctatgcgtcgggtatcgccgtccagcatcggcgccagtcttcggcgtacgccgcgctggtaaacggacatcgatttatcaggggcaaaggtgcggataacctggcgcttgttgcgctcgccaatcccctcaagatccagttcatcatggttgcgcagccagttgacgaagcagcacccgtccggcggggtcaccatcgcctgcagggccttcaccaccggcgcggcgcgctgctgcgccaggctgaggtagaggtatttgttaagccagaaattaagcaccatctgcagccgatcgccctggccgaaataatgacggtaatcttctaccgcgacgtccacttcacccaggagtatcgcatcgggattgaggcgctgtacaacctgccggagatgggtcagcagcgggtagccgcgcgtctcgtcgccctttccggcctgcttgaccagatgtgacgcggcatcgagacgaaagccagacaccccagcctgcagccagaaggtgataatgttttcgatttcagcgatcaccggcggatgggcgagattcaggtcgggctcgtggtgataaaacatgtggcgataatattgcccagcctgttcgtcccagcgccagacgctctcctcaacgccgggaaacatgggaggatcgtcgttttccggcggccgatcggcccacagataatacggccgccacggcgaccggggatcgcgtcgcgccgcctggaaccacgggtgctgcgcggaggtgtgctggatcaccagctcaacgatcacccgcagtcccagctcgcgggcgcgggcaatcagctcaatcacgtcagcgatagtgccgaaccgcggatcgggctgcagatgatcgctgatatcatagccatcatcctgcagaggagtgagatagaacggagtcagccagagcaccgtcgctccgaggctgcgaatgtagtgtagcttttggcgaatgcccgcgagatcgccaaaaccatcgccattggcatcataaaagagcgaactgtcaacctgatagatgaccgctctgtgaaaccactcttcccgttgcatcactctcacctcgcgttctgcccgtccctgtcagccgcctcagcgcgatccggaccccgccctggccttcgcgcgcggtttgtcgacaggcgatacgggattgcgttccgctggtagcatcctgttcgctaccgcgtccaccagcgcctgctgcctggcggttaataccagcggaacctgttcctcggcggcgaggagcgcgatggtttgccgtttgaccatagcgttctccggcggcttaatgcccggcctcaacgccaggcatatcggtatccataagatattgcccggtcagcgctggcagataatggagcagccaatcagccattcctctctcttcagccaggataccctccagtgtatgcatcgcgctgtggtcgcctactcttttcgccgccgttaataaagcggtatagcaggcgacctcaaaatgggcaaaaacgtaggcagtgataatcactttaataacctcatcaccgggcagcatgatgccaatggtctgtcctaacgccgccacccggctcatcgcatccttcagcgcagagcgggaaatatggttgcgggcgatgatatcctgcagggcggacaattgccgtcgggtttcatagagatgttgttcaaggcgggtgcgtaactgcggttcattatcgaggcgtctgatggtggccaccagcagcgactcagcctgtttttccatggcatgcgcatcgcgaagccagttgtgataattttcgatatccgtcatatacacctctgatcattaaccttttattttgacgtggaatcttcactctcttccgccgcctggtcagctcgcgctgcgctatatccggataaatggccaacaatattggcataaatactgatgagaatgacccacagtacgctgtctttccaccagatcaacgagggtatcgccagacccacccacataacggcggcgacaagatgacagcgcttaataaacactggcgtcaacttcattttattaccttaggaccgaacaatattgagcgaccattttatcgacgctctgaccgcagcgtcaggcgctaaaccttacgctgaaaatgtctttcttttgcctaagcataaaaaagaaagtagcgttgcgtattgtcccgttccgttattttctgtctttaccgtccggctaatttattgccgctgcggccgtcttttattgctagtgatgcggcgacttcctcctcaccttttagtttccccacatcgcggataatgaatgtcgttatagataaataaaccctgaatatgcagaaacctgcggaccatctggcccacaggttttgtctcaacgccgatttgtcggcgtcacagctcatcagtcgctagctgtcaccggatttacggccgccgccatgactgttcttaccacccttcttaccggcttcggatgcacgctcaggatcatttttaaagttcccgccgctgtgctgtccgcctttacgcccggcttcggatgctttctcacgatcttctgcaaaattacctgaaccgcctctatgctctgccataattttcacctttggtttgatcaatatcggttggtaaatggaaaatgaccctgttacaaatcatcgccctcgatatctaacactagaggaatgcctgcaggagtcaaattaatttcagatacccatccgcgcactgacaaaataaagctttactaacgaagcggtaagataaaatatacctcacacaactcctttatttgacgtaggttatgttcaccggcgggtaaaacagaatcgtccaacggccgtttgtaaaaaaatgcaaacgatttaatgaataaatatttctttatcccgcggaacacaaccccaggaatattacccctaaagaggtatcaacttataggccatggtttgcgaatgaacatcttcatcgtttattcagggagcaccttcatcctaactcgagaaaaagatcatgcgcgttacgaaaatagccctcgatccttgattaaggatggaataatcctaatttaacgtcagcaataataacgcaacgctatcccccgaaatacgccaaggatcagtcggttaaggcataccgttacgcctacggttggccattgactgcgatgttgcgagtcattcagtggctgtcgccaggagaagctgacctattcttagagctggcccgttctgtctgaaggagatgactatgcaagatgaaaaaccgccaatgaagaagttacccacctccatgttgccagaagagacggctccacgtccggagttcccggagcaagaacaaaccccgccgggtctggatgcggaaatggagccatccccggaccacggtgaaaccagctacaccggctccgggcgactggccggtaagaaagcgttaattaccggcggcgactccggtattggccgtgcggtggcgatcgcctttgcccgcgaaggcgccgacgtcgcgataaactatctgcccgaagagcaaaaggatgcggatgaagttatcgccctgatcaaagccgaagggcgcaccgcggtggccctcccgggtgatattcgctccgaatccttctgccagtcgctggtggccgacgcggtggaacagctgggaggtctgagcatcctggttaataacgccgggcgtcagcaatactgtgaaacccttgaggaactcactaccgaagacttcgacgctacctttaaaaccaacgtctacgcgccgttctggatcacccgcgccgcactgcctcacctccaggccggaagcgcgattatcaataccacctcggtgcaggcgtataaacccagcccgatcctgctcgattatgcgcagaccaaagcctgtctcgcgatcttcactaaatcgctggctaaacaggtggcgaaacgaggcattcgcgtgaacgccgtcgcgcctggcccttactggacggtgctgcaatccagcggcggccagccggacgagaaggtgaaacagtttggcaaagacacgccgatggggcgcccgggacaaccggtagagatcgccccgctgtatgtcaccctggcatccgatgcctgctcatatacctccggacaggtgtggtgttctgacggcggggatggtgtggtctaagcctcccggcataccgacgcgcgccagcgcgcgccggtattttcccggccaacccttgcggctatatactggcccctcgcctcccggttgcggcaattttttctttcctccactccgctactctggccgcatgctatgatgtccgcccgccgctgtgcgctaaccctggccccgacgccacccctgaggacgacagatgagtaatgacatccccctgaaattttatgacatcgtggacgaatacgagaccgaagcggctgcgccggtaaaggatgaagaacgcgatgcgctggcgcgctatttccaactgctgattgcgcggttaactaataacgaagagattgacgaagaggcgcagcgagaaatggcccgcgaggcggccattaacgaaaaccgcattgacgatatcgctaatttccttaatcagtggggcaacgaataaagctcaacgtcagcctaccggcggaattgccttccgccggtgctgtcggggcgcgaagcgccaagactcagccgtggcctgtctcctctcccagacgcctctgcagcgcatcaagaaatagcggtaatccgtcaggttggtagtcgcgggaaagatagatgccgtaaacgctcaacgccttcggcgtccactccggaagcaccacctccagcgtgccgctggcaatcgcgccccgggcctccagttcgggaagcatcgcaatgccgcacccggcaaccgccgcctccagcagcaatgaagatatccctgcgctcagattaccgttcaccgccaccgacgcttcccgcccctgcgcatcgctgaactgccagtgctggctggcgaaatggctgtatagcaggcagttatgtcgttgcagatcgtcgggcgtcgtcaatgggccatgctggcgcatccagcccggcgcggcgcagagcagcgaacggcacactccgaggcgacgagcgatggcccccgcctccgggttgtcggtaatgcgaatggccacgtcgatacgctcgccgatcaggctgaccggatggttattgatatccagctccaggcgcagtagtggatagcgggcgagaaagtccggcagcagcggagagatcagctgcatggcggtaaagtgcgcgcaggcgacgcgcagtgtgccgctgggatcggcccgctgacgctcgccggcgatttcatcggcgatccgcgtcaaaccgcgggtcttgagcaataccttctccccggccggggtcagcgtcagccgccgggttgagcgatggatcagccgggcgccggcccagctctccatttgttccagatagcggctcaccatcgggcgcgacatccccagcgcccgcgccgcggcgctaagacttcccagctcgcagatgcgcagatacacctgcgcagcaatcaccctgtccatcactccccctgatctgcacgttttatgaaactcagcatctcttgtttcaggaattctatcaaatagcgaaatccgtacaatggaacgcattcacctgttactgagaataaatcatgaaattatctgcccttgctgttgctaccgccctgttcagcggcgcggtcttcgcggcgcctctgacgctgcaaacttacaacccgcaggaaaaaggactttttgccgtcaactcgaccctcgtttccggtccgcatgaagcggtacttttcgacgcgcagttcagcgtcaaagatggggaaaagctggtggagatgatcaagaaaaacggcaaaccgctatcgcggattgtgatcacctctggcgatccggatttctattttggtcttgagccgctggtaaaagccttcccgcaggcggaggtggtcgccacgccggaggtcgtcaaacatattgcagccaccaaagcggccaaactggcgtactggggcccgcaaatgaaagacggcgcgccgacgcaggtgtatgtcccgcaggcgctggaggccaacagctttaccatcgatggcgagaaagtgaccatcatgcagccgcatgactacgcggcgttcgtctggatccgggcgaacaaaacgatcctcggcggcaccggcgtggcgtggggtatgcatctctggaccgccgacacccagacgccggccagtcgtcagcaatggcgtaatacgctggaccagatgatcgccctgcacccgcagcgggtgatcccgggccattatctcggcaccccgccggagggagacagcgcagtgcgctttacaaaaacttatctccagcagttcgagcaggcgctgaagacgcattcggattcggccggggtgatcaaggcgatggaggcacagtggccgggcctggcggagaccagctcgctggagttaagcgccaaagttaataccggtgagatgaagtggtgacccctgcggcgcgcaaggaggactgttcttaatctggctccccagggttgctattaccgagaaaatagaccaccctacctgtggccgcacaaaaaacgcgcggccgactttgggttacatttcatccggtcattaccgggtttgcccttgaaaccagaacaggataaaggagtcagaatgaaatcgaaccatcaggcacgtcatcttctcggtctgaactataagctttcccggcagaaaaaagtggtgctggaaggcgatgaagaaaccaccatcaaccacatccatgctaccggccgcaaacgccgcggtggttaattttcagcctgagtgatgataaacaacaccgtcctgttgccaggatggtgtttttttatggcaattgactgcttgtttacccgcttgaagaccttctgctctatactctgcccgctgctttccacccgcccttcgcttatcgccgcgccgggactgtggtcatgatcaaggagttagtgcgatgcaatttacccataagaaaaaccgttccctgtacatcccctacgcgggtcccgttctgcttgaattccccctgctcaacaagggaagcgccttcagtatggaagagcgcagcaatttcaacctgctcggcctgctgccggaagtggttgaaactatcgaagagcaagcggaacgcgcctggatccagtatcagggattcaaaactgaaatcgacaaacatatttatctgcgtaacatccaggacaccaacgaaaccctgttttatcgcctgatcggcaaccaccttgaagagatgatgccggttatctataccccgacggtaggcgcggcctgcgaacggttctccgagatctatcgtcgcgcccgcggcgtctttatctcctaccagaatcgccataaccttgacgacatcctgcagaacgtcccgaaccacaacgtgaaagtgattgtggtcaccgatggcgagcgcattctcggcctcggcgaccagggaatcggcggaatggggatcccgatcggtaaactgtcgctgtacaccacctgcggcggcatcagcccggcttacaccctgcctatcgtgctggacgtcggaacaaacaaccagcagctgctcgacgatccgctgtatatgggctggcgccatccacgcattaccgacgacgagtactatcagttcgttgacgacgtgatccaggcgattaaggcccgctggccggacgtgctgctgcagtttgaagattttgcgcaaaagaacgccatgccgctgctcaaccgctaccgcaatgaaatctgctcgtttaacgacgatattcagggcaccgcggcggtgaccgtcgggacgctgatcgccgccagccgcggcgccggtagccagctgagcgagcaaaaaatcgtctttctcggcgcgggttcggccggctgcggtatcgctgaacagattatcgcccagatcgtccgcgaaggactcagtgaagaagaggcccgccagcgcgtgtttatggttgaccgcttcggcctgttaaccgacggcatgcctaatctgctaccgttccagaacaagctggtgcaaaagcgtgagcagctgcagagctgggataccaccagcgaggcgctgtccctgctggacgtagtgcgcaacgtgaagccgaacatcctgatcggcgtctcgggtcagccgggactgttcacggaagagattatccgcgagatgcacaagcactgcccgcggccgatcgtgatgccgctctccaacccaacctcacgggtggaagcgacgccgcagaatatcctgagctggaccgacggcgaggcgctggtcgccaccggcagtccattctccccggttaccgtgaaaggcaagcagtatcccatcgcccagtgcaataactcctatatcttcccgggtattggactgggggtgatcgcctccggcgcgtcgcgggtcaccgacgagatgctgatggctgccagcgaaaccctggcgcagcactcgccgctggtcaacaacggcgaaggtccggtgctgccggagctgaaggatatccagaccgtctcacgggcaattgccttcgcggtcggtaaggtggcccaggagcaaggcgtggcggtgaaaacctccgctgaagcgctgctgcaggccattagcgataatttctggctgccggaatatcgcaattatcgccgcacctcgatttaatcacgctcaccgggtcgacatatcggcccggtttttaataacgtcagaataatatctcccgccacagaaacgtttttttcgcccatattcattcatcgtaaaaatataaaacggatagcatttgccgcgcgccctccgctgtgcaaaatagttgtttctcaccccctcacaacggaatgtgaaatgctaaaattaacccctggcgcgaataaagcgaatgcgattctgatccgtattgtcttgtttcttatcggcggtatcgccatcatcaccggaatgtgcctcttcagcggtgatatgtggatgctcaccccgcgggcggaacagtatcagcccgccaccggcgatctggtggatgtcgtcatctatgaaccgagtaaatttttcttcgccctgctctacgtgtttattattaccctggtctggctgctggcggtacgtaaaatcccctggcggccgatacagcatcctatattagcgctgataatactgattgccgccgggatatttattttcctccacccggaggtcaccccgggtcgggatgccagtattcagtacggtaaacacaatacctattatgcgtccatattctggatgaaaacccggtcaggtagtcattccgctaagcaatcaaaatatgaaacctttgttgaagcgaaagatccccgctggcttatcgacagaaataatcttcgccgcgcctggcgctgtgaagtgcagcggcatacccagttttacaccctgtcattcaatgagggctggttcccgaacggcgatccgcaggtccttgccaaccagtgtagtcagattgccgatctggatacggtctctgaagacgagctgcttgtcactaaaaccatcaggagccgtaaatgagccagcaaaaaatggttttgcagccgatattacgcctctggctggggctgtttagcggactgttgctggtgagcgccatcagcgcctttcacggtgagtactggtatttcggcgataagcaggcgttttacgcggcgaaagccggcgaggtctctgtgcatgaactctatacgccggcgaaaatcctctttgcttttatcgtcagcacgatcccgccgctgctgtggctgctgctggttaaccgtcgggcgccgcggctgctgacccacactctcccatcggtgttactcctgctggcgggtttgctgtttttcttcctgagacccgacgtgattcccggcggggaaacccctgtctatcgctacggcgagcgggagcgctactaccagacgatacgctggcagaaaccggagcctggcgcgtggcggggtacccgctctgagtacaacgtgtatatcgaatatcgtgatcccaggggatatcgcaaagtcgacaatattaaaaacgcctatacctgtgaaacccaccgggagtctcgcttttttaccttaacgaccgaagaggattggtatccggattcgtatccgaatattctcgaggctccctgccaggcgataaaggatccccaggcgatgacggaatatacccgcgaccacgcccgctggtttcccattacgttttagcaaacacactagccttttgcgccaacaatatctcgccggtaatggcactgaacacgaaaactggtgggtatcggcccctgccagttttgtcactggcgcgctttccctttccccactacactgccatcacccatccacttactgaataaaaaaggaggccccccatgctgtattgtgaaatgtttattgtttcacatgccttaggcaattgcgccagctcaagcgttatcggtatcgtgctgcgataactatggcttgagcgaagacccttcacgcaatcccttctctccggcttaccgggttatcgtcagcgagttttgacgaggcatttgcatgcctgtaactcttgagtaagttgactatgagtacattactaactgcccatgcgctccacgtggagacggcttttgggccgctgtttaactccctctccttcaccctgaagaaaggcgaccggatcggtctcatcggccataacggttgcggcaaaagcaccctgctgcaggtgctggacggcaccctcgcgcccacctcgggcagcgtctcgctcgccggtcagtgtctgatggcccgcgttgaacagcatctgccggaggcgctgcatacgcagtcgctgctgcaggcggtgctggccccattacccgccgacgcgcgggaagcacagcgctggctggccgagcgcctgctggcgcagatgggctttaccccggcggtgatggagcagcagaccgccaccctgagcggcggccagcacacgcgtctgctgctggcccgggcgctgatccgccagcctgatctgctcttgttggatgagccgggcaaccatctcgatctgcccaccctgctgtggctggaaagcttcctgcaaacctggcaggggagcttcgtactggtgtcacacgacaacaccttactggatgctgtaactaatgcgagttggatcctccgtgaccagacgctacattgcttcgccttgccctgcagcgctgcccgtcaggcactgcaggagcaggatgaaagcgccgcgttacgtcataaggcggagcaaaaagagatcgaccgggtcagcgccagcgcccggcggctggccacctggggtcgggtctatgacaatgaagatctcgcccgcaaagccaaacagatggagaagcaggtcgcccgccttaaagacgagcagaccgagctcagcgtcggcccgccgtggcgcctggtgttacagggggacgccctgccggccgaccgccttttggagatggacacccttcccgtctcgcccgcgccgggtcagccatccctcttcaccaccggcgtggcgcgcctgcgcagcggcgatcgcgtggccatcatgggacgtaatggcggcggcaaatcgtccctgctgcgcctgctgtggcagcagatgaacaacgcatcgcctctcccggggctgcgcctgcatccccggttgcaccccggctactatgaccagacgctggcgcagttgccggacgaggccagcctgctcgaggccctgacgccgtttgccccgtcggcggacacccgtaaacgggcgctgatcgccgccgggtttggctgggcgagacatagccagaagatcagcaccctcagcggcggcgagcgatcgcggctgctgttcgttggcctgtcgctggcgcgctacagtctgctgctgctggatgaacccaccaaccatcttgatatggagggtaaagcggtgctggcgcagacgctgcgcgattaccccggtggcgtgctgctggtcagtcatgaccgccagctgattagcgaaagctgtaaccgcttctggctgattgacagtgccgggctaacggagtggcacagcctggaggtggtctatgcccgtctgcaggccgtggcgcccgccccggacagtcggctcgctttgcagagtacacccgccggggctgacgatgatgaggaggcgctgctggcgcggctgattgacctggagcagtggctggctgacgacatggcccgcaagccaaaacatcaaaagccgtcgctgcaggcacagtggcaagaggagattgcccgcctgcttaaccaactgacgtaatctccatgtccccccaccggctaaggcgcaacacccttagccgatgtttccggaccgggtaaactgctgctcggtcattacctttccccactgctccccctgccattcgcggattaacgtgaagccaaaggattcatacagtttgcgggccgcgtccaaccctttaaaggtccacagctgcaccgcgctaaactggcgactatcgcagaaagccatcgcctcgctgaggagccgcctgccaatgccggttccccggcagctgtcatcgagaatgaaccagcgcaaatgcgcctcctgctggccgaggtcctcgccatcgatagccagcgagccgacgattttcccttcgcggatcgccagccagatctggttggccggggaggagagccgggtggcaaattccgctacgccgctggcgaccttgccttcaaaaaaagcgccaaagtcatgatgacgggcgtaatactccccgtgcatctgggctatccggccgatcatccccggctggtagccggtcatcagcgaaatttgcggagccgtatccgcaagcgcgctatcccgacactgcgccagcgcccgggcataggccgccagtccagtggcgacagtgtgctgctgcgtctcatccagatggtctaacgcctccaccacctgacgggtaccccaggcgttaattttcgccaccgtatcgtgcccctttgccgtcagggcgagtgatttcgcgcgcgcatcctccgcgcaaggacgctcctccagctcaccagccgccagcagacgagagaccacccggctgacgcttgatttttccagtcccagcaacgtgaccagctgcgcggccgtcatctcccccctcatcgatacctcaagcagggtgtgcaccgccgaaggtgaataatgggtggcggccagcgtggtgctcataaagcccagctcgcgcaccattaaccgcgaggcggtacgaatctgttggattaagggggtatcaggcatggcggcgggtccagaaaatgaaatggttgtacaatacaacctcgccttcatcctgcgtcaatatgcaatatggtgggataagcgttgtcgtgtgacgtgtgacgtgtgattttgccgccacagggatcgtgaaagcgaatgccgcgggcgccggacagcgcccgcgatgaatattattgcgggttcttcgccttccaggcctcccaggccgatttgatctcctgcttcgcggccgcggcgtcattaaagccggccagctcgacctttttacgcccctccggcagttctttatagacccggaagaaggcctccagccgctgctgttctattttcggcagatcggagatggtcttgatgtcgtcgtaggtcgggtcaattttactggccggtacggcgatgattttgtcgtctttctcaccgccgtctatcatcttcagcacaccaattgcccgcagcttaatcagcgtgcccggggccatcggcgcgcgggtataatacaccacgtccagcgggtcgccatccccggccagcgactgggtcagcgagccgtagttcgccgggtaggccaccggcatcgactgaaagcggtcggcgacgataaaccccgttttagcatcggtttcgtacttaacgatcccgcccgtcgggatctcagtgacggcgtaaaattcttccgggttgttttccggctggggaaattccagcacattgtgggcctgggcggcggcggacaaaagcagaccggcggtgaggatggtttttaccagatgcattgttgtatcactctgttgttataagaaattgatgcgcaaaacaatagattcgagtgatgacaaaaacatgaccattcagcgtcaatattattacctaccaaatatagcgatattgtctgaattttgtgctatccctgtagcaaaaagccacattctgtactaagcgccttgtattttaccgctcagcgtctaatccttattgggtactattgcattaattaagttaatcaattcccccacaaggagacaggcatgaaggcagctgttgttacccacgaccatcaggttaacgtcacggaaaaaacgctgcgcccgctggaatacggcgaagcgctgttgaaaatggaatgctgcggcgtgtgtcatactgacctgcacgtgaaaaacggcgattttggcgataaaaccggcgtcattctcggccatgaagggatcggggtggtacaaaaagtcggcccgggcgtcacctccctgaagccgggcgaccgcgccagcgtggcgtggttcttcgaaggctgcggccactgcgattactgtaacagcggcaacgagacgctctgccgctcggtgaaaaacgccggctataccgtcgatggcggcatggcggaagagtgcatcgtcaccgccaactacgcggtaaaagttccggacggcctcgactccgccgccgccagcagcatcacctgcgcgggcgtcaccacctacaaagcggtcaaggtctcccacatcaaaccgggccagtggatcgccatctacggcctcggcgggttgggtaacctcgcgctgcagtatgcgaagaatgtctttaacgccaaagtgatcgctatcgacgtcaacgacggacagctggagctggcggcctcgatgggcgccgacctgaccatcaactcccgcaatgaagatgcggcgaaagtgattcaggaaaaaaccggcggcgcccacgctgcggtagtaaccgcggtggctaaagcggcctttaactcggcggtggatgccgttcgcgccggtggccgcgtggtcgcggtgggcctgccgccggaggcgatgagcctcgatattccgcgtctggtgctggacggcatcgaggtggtcggttcgctggtcggcacccgtcaggatctggtggaagccttccagtttgccgccgaaggcaaagtggtgccgaaagtcaccctgcgtccgctggaagatatcaacgctatcttcaaagagatggagcaaggtcagatccgcggccgtatggttatcgatctgcgtagctaatcacccgcgcctctcccgtccgggagaggcgatccccctggcacgtcctctcgcttcccaacccgggaagtaaatgcaatttccgcaaatgcttagcgcaattccttggttcctttgtttttagccgcgcccgatgatggcaacacaatagataacaaaggaattcaccatgcatcgtcattttcgcctgcccgcgctggccgcgctgtttctcaccggcgccttttccgtctgggccgccgacacgccggttaaaggcggcaccttaatttatctggagcagcaaccgcacaccaatctctatccgcccgccggcggcttttacccgaatggcgggattctcaatcagataaccgacaagctcacctggcagaacccgaaaacgctggagattgagccgtggatcgccgagagctggaccagcaatgccgataaaaccgagtacactttccacctgcgcaaaggggtcactttctcagatggcacaccgctggacgccgccgccgtcgccaaaaacttcgatacctatggtctgggagataaagcccatcgtctgcccgtctcggaggtcatcaataactaccagcgcagcgaagtgatcgacccgctgacggtaaaattctacttcaacaagccgtcgccgggcttcctgcagggaaccgccaccatcggctccggtctggtatctctcagcaccctgcagcgtaattttgaagagctgggcgatgcccgacatattatcggctccggccccttcgtcgtgcaggatgaaaaaccaggccgcgagctgacgctggtggcgcgcaaggattaccagtgggggccgaaaaacattgcccagcaggggcccgctaacctcgacggcatcacctatattgtgacgccggaagacagcgtgcgtatcggcgcgctgctggcaggtcaggcgggctttattcgccaggtgcaggcctacgatgaaaagcaggctaccgatcagggatttaagatctacgctgcccctacccgcggggtcaacgacagcctgagcttccgcccggataacccactggtcgccgacctgcgggtgcgtcaggccctgctccatgccaccaacgccaggcaggtggtggagacgctgttctccgctaactacccgcaagccacctccgtgctggccagctctgccgccggctatgtcaatctcagcgataaactcaccttcgaccaggccaaagcccggcagttgctggatgacgccggctggaagcccgccgccgacggtattcgcagcaaagacggtcagcggctggcgctgaccgtttatgagtcgctgccgcagccgcaaaataaggaagtgctgcagctgatcgcccagcagtggcgccaggtgggtgtggcgttgacggtcaaagccggggatgccggtagccgtacgctggataacctcgacccgcagaaaaccccgctcaccgtctcagaagtgggccgcgccgacccggatgtggtgaaaagtatgttcttccccaacaaccgcgatgcgctgctgcagaaaggcggctccagcgataaagtgcagcgcttccgcgatgataagctcaatgacctgctgaccggcatctccgcggcggttgaaccgcagcagcgcttgcagttaaccggtgacgcccagcgctatctgatcgataacgcctatgtgatccctattttcgaagagccgcaggtgttcgccggcgcgccgtgggtcaaaggcgtcagcttcgaggccgtcggtcgtccgtcgttctacggcgcgtggctggacaagcactaagaggccggttatgagcgcttatcttctgcgacgattcggccaggggctgctggtcctgtgggcggcctttaccctcacctttttcctgctgcaggtcctgccgggggatgcggtgctgatcaagtttcagaacccggacctcggcctgagcccggcgcaaattgcggagatgcggctggcctacggcgccgatagcccgctgtggcgccagtacctgcacacgctgctggcgatgctgcacggcgacttcggctattccctacaggcgggtctggcggtcagcagtctgattgccagcaacctgccggataccttaagcctcgcgctgccggccttcctgctggcggtggcgctggcgttcgccctcgctttcgcctcgcggctgccggggctgcgctggctgagcaattttctgcagtcgctaccggtgctgtttatctctctacctaccttttggttgggtatcgccctgatccagctcttctcgtttcagttgcgctggatcccggtgatcaaccccggcccactggaaggactgattttaccggttatcgccgtcgcactgcccatttccgccccactggcgcagatcctgatgcgcagcatggatcaggtggcggttcagcccttcgtcgcggtcgcccgcgccaagggcatgagcgaaacgggcgtcctctggcgccatgtgatggggaatgccctgctgccggcgctgaatattgccgggctgctgctcggcgaactgattgccggggcgctgatcaccgagaccgtcttcggccgcagcggcctcggccagctgacccagcaggcggtcaataaccaggatatcgccgtactacaggcggtggtgatgatctccgccctcggtttcgtcctgatcaacctgctggtcgacctggtcatgccgcgactggatccccgactccatttacagaccggaggtgcgaaatgagcctggtcgactataccatcgcggttcgccgccgcccggagtggcgtagagtgcgcctgcagcctggcctgtggctggcgtgggcggtgatgatcgccgccctgttaatggccattgccccacagtggtttacctccgctaacccgctggaggggatccccggcgctcagcgcctggcgccgcaggcgcactactggctgggtaccgaccagctggggcgcgacctgtggacgcgggtggtttacggcgcggtgcattccctgtcggcggcgctgatcgccgtcgccatcggcctggtggtgggtaccacccttggcaccctcgccggggcgctggccggacgcgtggaatccaccatcatgcgcctggtcgatgtcctgctggccatcccctccctgctgctgcagctcacggtgattattctgctgggtttcggcacggtgaatgcggcggtggcggttggcgtcgcggctatcgccagcttcgcgcgcctggcgcgagcagaagtggtgcgcgtgcgccacagcgattacgtcgaggcggcccggggcagcggcggcacctttttcgccgtcttctggcgccatattctgcccaactcgctcactgcggtgcttgctttcgcgacgctgcagttcggacaggcgatgttggccctggccacgctcagtttcctcggctacggcaccccgccgccggtcccggagtggggactactgatcgccgaaggtcgcaattacctgtcaaccgcctggtggctgaccaccttccccggcctcgccgtggtcgccgtggtccttgccgccaatcgtcttagccgccagtggagtggagcacgcccatgaccgttttgtccgttgaagatctacgcatcagctaccgctcgcggggcgaatggcgcgaggtggtgcacaacatcagcttttccatccagcgcggcgaaatgctggccttcgtcggagaatccggctcggggaaaaccaccaccgcgcaggccattatcggcctgctggcggataatgcccgccgggatgccgggcggattgtcctcaatggcgaagtgattagcgactggtcggataaacgcctgaaccgcctgcgcggagtgagcatcagcctggtcccgcaggatcccggtaattcgctcaacccggtaaaaaccattggtcagcaggtggaagagatcctgcggctgcatcagtccctctccgccgctgagcgccgacagcaggttcttaacctgctcgctaaagtcggtctcagccacccggaacagcgttttgaccagtatccgcatcagctgtctggcgggatgaaacagcgggtgctgatagccatcgccattgccctgcagccggatctgattattgctgacgagcccaccagcgccctcgacgtcacggtgcagaagcgcattctcgacctgctcgatatcctgcgtcgcgagtcgggtaccgccgtgctgtttgtcacccacgatctggcgctggccgccgaacgcgccgaccggatcatggtgtttcgccagggagagattcaggaacaaggcgccaccgagacgattgtccagcgtccacagcatccttacacccgccagctgctccacgacctgctggatgcgccgttggggctgacggcggcgcgtcaccggccgctggccacgccggccattcgcgtggaggggatcagcaaacgcttctcgctgggcaaacaggcgctgcaggcgctcgacagcgtcagctttgaggtcagacgcggcagcacccatgcgctggtgggcgaatccggctccgggaaaaccaccctggcgcggatcctgctgggctttgagcgcgccgacgccggacaggtcaccatcgacggtatcgacgccgggcatctcagccgcgaggcacagcgtcagctgcggcgcaagatccagtttgtctaccagaaccccttcgcttcgctcgacccgcgccagacgctgtttgcgattatcgaagagccgttaaaaaactttgagcgcctcagcgcggcgacgcgtcgccagcgtgtggagagcgttgccgcccgggtggccctggcccccgagctgctgtcgcgtacgccgcgggagctttccggcggccagcgccagcgggtggcgattgcccgggcgctgatcctcgagccggcgatactggtccttgacgaagcgacttcggcgctcgacgtcaccgttcaggcgcagatcctcgccctgctgcagcagctacagcagcagctgggactgagctacctgttcattacccacgatctggcgacggtcaggcggatcgccgacagcgtcacggtgctgcgcgccggccaggtggtggagcatggcgacgtaaaccgcctgttcgccgccccgcagcaggcctacacccgcgaactgatcgccgccattccccaggtttcctcccgcttagcacaggcccacacggagaacgcataatgccaaaacgcctcggtttttttacccgtctgctcgatcagggctccgcgcaaacgcgctaccggctggcggccgaacagatccgccacgcggagcgtttgggcttcgacagcgcatggattgcccagcaccattttcatgaacaggaaggcggcctgccttcgccgctggtgtttctcgcccacgtcgcggcgcagaccgaccggatccgcctcggtacggcgattatcaccttgccgatggaaaatccgctgcgcgtcgccgaagacgcggcggtactggatttactcaccgacggacgtctggaggtgggttttggctccggcggcacgccaacctcgtttctgcccttcggcctgaccagcgagcagcgcggggcggcgtttgccgaccatctgcacctgatccatagcgcctggcgcggcgacacgctgagccacccggacaaccgtctctatccgccggcgccgcagttggcggagcgtatctggatcgccaccttctctgcggagggcgccatccgcgccggtcaggcgggacacgggctgatgctgtcccgcacccagccacggccacccggcgagccacgtctgccgctggacgccattcagaacccgatcattgacgcctacctggcggcgctgccggacggcgttgcgccgcggatcctcgcctcgcgcaccgccttcgtcgccgacagtcacgcccacgccctgcaggtcgccgagcccggtctgcgcaagcaggcaactcagcaccgggcggcgggtcatacgatagaaggtgacagtgtcaccgactatctgcaacagcttgatgcccacgttggcgatcctgagcatgttattgcctccctggcgcaggacagcgtgctggcccgcgccaccgatatttcgtttcaggtgcactcggtcgagccttcgcaccgggatacgctgcgttccattgagctgatcgctcagcatattgccccccacatcagataaggagtccccatgacgctgagtcaggatattctggccgaactggcggagatcgcccccggttccccgctcgatcaggcgcgcgccgtccgcgatgccgccacccgtcacgcccagggaagttatgaagtgctgttccgccagcaggacgctgactttcctcttgatgaacgcttcgcggtggccgcgaaggtggcaaaactgcaccaggcggacgcgcttgcggcgcactatgccggtttcggcctcgccgatccgaccaccgatcgtctggtcccggcgctggcctttgcccgcctgctcaccttcacccccgttgaagccactcccggcgcgctgcacaccttaaccagcgcgggctggagcctgcggggcatcgtcaccctggcgcagctggtagcctttgtcagcttccagagccgactgctgctgggcctgcgggcgctcaaccataagcccatcgtcagcgcagatacgccgctggtcgccggatactggcataccaccccgtacgcgcagagcggcaaagcggccccggttcgcttcacccgcgacgagctgcactgggaaccctggctggccgataaaccgctggcggaattcaacgctgaagaacaggcgattctggccaaatatggccatagcgactccccctactttcgcctgctggcgcgcaaccagccggtgctggagcagcggaccctgaccgataggggcattttctataccgcgggaggattgccgcgcgccgaacgcgagctggccgccacggtcgccagtaaaatcaacggctgtatttactgcgcctcggtgcatgcccgcaaagcggcgcagctggcgaaggacgagaccgccgtcgacacgctgctggcggtgacgccgggagaggatctacgcgacgggcaatcgccgcgctggcaggcggaaatcgacgccgccgccgcgctatcggtgacgccacccgcgttaaacgccgatcatctggcggcgcttgatgagcagggcttagatactctggcccagctggatctgctgcagtccgcggcctttttcgcctgggccaaccgcctgatgcttaccctgggcgaaccctggcgtgagtaggcgtcgttagtaagcttgtcgccgctgatggcagccatagatgagcaaggcgctcatcgccagaaacgacagcgcggcggcggggagcgccacgctgttccagccaaagccctgggcgatcatcattccgccgcagaaggcgccgatggcgctgccgaggttaaaggcgatctgtcccccggccgcccccagcatctcgccgcctttggcgttctgcagcagcaggatctgcagcggcgccgacagagcaaacagcccggcgcagcagagaaatgccagcgccagcgaagcgactttctgttcaccgaaggcaaagatcagcagcagcgtcacggctatgaccccgtcggtcatggccgcaatgcgcagcgggctgtagcgcccggaaatcttgccgctgaacagattgccgaccaccattcccagccccgccagcatcataatcagcatcatcttgctttcagcaaagccggagacgttgagcataaagggcttgatatagctgaaccaggcaaacacgccggcgttaccgaacatggtggcggcgaaaatcagccacggcgccggggaggccagaaaacggaactgctcgcgcagccgcgtgctggcccggtcataaagcgtgggcacccagcagaagatcgccagaaataccgccacgttaaataccgcgataagcgcaaaggtatagcgccagctgaagtgatgcccaagccaggtgccgcccgggacgccaaccaggttagcgatcgtcatgccgccaatcatccccgccaccgcggcggtcaccttccccgggggcgcgattttcgacaggataatcgcgccgacgccaaagaacgccccgtggggaaacccggaaaccagccggccaagcgccagcatggcgtagctactggagaaggtaaacagggtattgccgagaatacacaggccagccaggaacagcatcaccgatttcagggaaaaccggctggagagcagcgccatgatcggcgcgccgatcaccacgccgaaggcataccaggcaatcatattgccggcggcgggtatggatattccgacatcgtgcgccatatccggcagcacgcccataatgccaaactccgccatgccaagtccaaaggtgcccagcgccagtgaaaaaatcgtttttttcatacatcttatagggatattgagagccggccggcattatttaccatcccgccccgacacaccagctaaaaacgcccgacggcagtttcctccatacaacagcctgattcgttcatgttccccagccgcgtggcataccggcggcgtggtttcgtagaaacaatccactatcaaaatcagtgagctcaaagagataaacacctcattgatctcaagttaacttgaggttgtaaagtcaaaacatcgttcaccttgggagaattatccatgcaaagtgttgatgtcggttttactcatgtcgcctttaccgtccgctgtctggccagcagcatcgatttttatacccgctataccgcgatgaccatcattcaccagcgcgagcccgacctcccctcggcgcggaaagtggcatggctcagcgaccgcacccggcctttcgccctggtactggtgcaaagtgacgatccggccgatacgccgctgggaccgttcggccatctcggcgtcgcctgcgccacccaggccgagatcgatgagaaagtggccctcgcacggcgggaaggtgttttacgccgggagccggagcagctgggcgatccggtgggctatttcgctttctttgccgacccggacggtaacaccctggagctgtcgtgggggcagcgggtgggactggaagtcatcctggcgggaaaacccggcgaataattttccaccgcctcgccgggggaggattacacttcaaagggatacctcggcaacacggagcatggcgatgggcaacaagaaaagcggtaatccggtcgacacggcggcaaaaatcgcgccgctcgacaacaaagcgtacgagaaagcgctgcgcaaactccacgttgagctggtgaaactgcagcgctgggtggtacacaaaggactgaaagtgtgcattgtctttgaaggccgggacggcgccgggaaaggcggcaccattaaggccatcaccgagcgcgtcagcccgcgtatcttccgggtcgtcgccttaccctcgcccaccgagcgcgaaaaaagccagctctactttcagcgctatatcaagcatctcccggcggccggcgaaatcgtgattttcgatcgcagctggtataaccgcgccggcgtcgaacgggtgatgggcttttgtacgccggaggaggtgcagaagttcctcgacggcgcgccgatggtggagcgcggcatggtcgaatcgggcattattctgctcaagtactggctggaggtctctccgcaggagcaggagcgccgtctgcgggatcgcatcgacgacgggcgtaaaatctggaagctctcgccgatggacattaagtctttcaaccgctgggatgaatataccgctgcccgcgacgccatgttcgccgccaccgataccgcctgggcgccgtggttcgtcgcccgctcggaggataaaaagcgcgtgcgtctaaatatcatcacccatctgctgtcgcagatcccctatgaagctttaccggtggagcctgtgacgctgccgaagcgcaaaattggcaaaatgaaacagactaattttcctttccgcttcattccagagaagttttgattatttcccgtcgcgctggttaatgccagcgccaggtttattaccataaccatgaatatttcaggctgttacttccctctggaagctgtctcgcaaaataaatattaaacttactgctggtatttattttttagtgggtaaagtaaataatcacagaaccaaccgcaaggagcctatgatgaaaagtaatacgctacgtaaaagacccactgacgtacccgtccagaaggcgtcagaacagccaggtaaggatttacgagaagcggataaacagcgacagcacaaggaattcattgccgcaatgaatgaatttattacaaaaggaggcactcttactgatgatgaatttttcagggtgctatgatgcttgaacaattcaatgtttatcgaaattgttctgctcagacaaataaaaccctgccatattatatgatcgtgcagaatgattattatacagacctggccacgagagtcattattcctttaatgcgaccacaacagttaccacgctggcatcagcatgtcgtaccaaggataaatatagaatttgacagctttttactttgtacgccaatgagcagtaacttaaataataaacggatcccgccacaggatttcgtctgcaatctgagtcatgcgcgccagggcgttatcgattcaatcgatactcttatcacgaactgctgactgccgggaatccgctccgacatcctcggagcgggtttcgcgccgtgaaggcttacttcatcccttcacgactctctttcatcgcctccaggcgttcgacatcgcgataccagcgcgggtgatgtttcttcgcccagcggcggctcaccttgccttcgatcatgcccttaatcgaccctttgacccagaatgccatatacatatggataaggatggcgtggatcagaatgatggccgacgtcgcatgaatcagcaggctatagcgaatcacctgcatcgggaaatattccgcaaaatatgggcgccagataatcaccccggtcaccagcagcacaaatatcatgctcatgatggtccagaacatcatcttctgcccggcgttatacttaccgacgcgcgccaccttatgctcgttgcctttcagcacctcgacgatgcctttcagccacggaatatcctgtttatcagggatgttgtggtggacaaagcgcacgaacataaacatcagcgcgacaaaaatcagcaccccaaagaacgggtgcagaatacgccccatctgcggcgtgccgaaggtttccgttagccactgtagcgtcggaaagaagaacgatattcccgacagcgccacgaggaagaaacagataaccaccgtccagtgacaggcgcgatcgataaacgtcgtgcgcacaatcatcttcgatttactcatcatgcttctcctcgtcgtcgtcaacttccttgttcggcccgataccgatgtagtggtaaatcagcccggcgaaggtggcgataaagcccgccgccgccagcggtttcagcgcccccttccacagactgatactggtatcgatctgcggttccttcggcagcttgtgatacagctccggctggtcggcatgatgcaggacgtacatcacgtgggtgccgccgacgcccggcgggttgtaaatcccggcgttggcataaccgcgttttttaagcttagccacccgctcctcggccacctccagcatctctttcttcgtaccgaagtggatcgcgccggtaggacaggttttcacgcaggccggctcctggccgacgctgacccgatccacgcacagggtgcatttatagacccggttatcctctttattgaggcgcgggacgttaaacggacaccccgcaatgcagtagccgcagccgatgcagttttcctgctggaaatcgacgatgccgttggcgtactgaataatcgccccggcggacgggcaggctttcaggcagcccggctctgcgcagtgcatacagccatccttgcggataagccactccagtttgccgttctgttcggtctcgctaaaacgcattaccgtccaggatttggcgctgagatccgccgggttgtcgtacaccccgacgcagtgccccacgtcatcgcggatgtcattccactcggaacaggccacctggcaggctttacagcccacgcaggaggagacatcgataagcttggcgacttccgctttatagtcccgcgcgcgcggcgcgggggtgatcgggttggtcgcggagcgtttaataatgtcttgggtttccatcgccattgaatcgctccttacgctttctcgatgttgaccaggaacgccttgtactccggcgtttgcgagttggaatcgccaacgttaggcgtcagggtgttggcgatgtagcctttgcgggccacgccttcaaaaccccagtgcagcgggatcccgacggtctccacctgctggccgttgacgttcagcgtgcgcagtcggcgggtcaccacggcaaccgcgcgaatgaagccgcgcttgctgctgactttcacccaatcgccgttagcgatacctttgcttttcgccagcccttcgctgatttcgacaaactgttccggctgcgcgatggaattgagcaacgcatgcttggtccaggtgtggaaatgctcggtcagacgataggtggtcccgacatacgggaatttatccttcttacctaagcgaatggcgtcctcttcatacaaccgcaccaccgggctggagaccaccttcgggtgcagcgggttagtgccaagcggggtttccatcggctcgtagtgctccgggaacggcccttccgccagtttatcgagcgcaaacaggcgacccagcccctcctgctgcatgataaacggcccggtgttgctccctggcggcgcggtattgaagtccggaatatcattcccgacccacttgttgccgttccactggatcagcatccgcttcgcatcccagggcttgccgttgatatcggccgaagcgcggttgtacagcacccgacgattgagcggccacgcccaggcccatcccagcgtattgcccaggcccgaaggatcggcgttatcacgattcgccatctggttaccctgctcggtccagctgccggtatagatccagcaagacgacgcggtgctgccgtcatcgcgcagcagcgcgaagctattgagcagttggccttttttcgccagcaaagtgccattttgatcgtagagatccgccagcgcgtagccgttgttctcttttgccacctcttccgattccggatggtccggctgcttgtagcgccagctcatcttcagcaggggttccgcgcccttcccgccttcggtgcggtacagttcgcgcaggcgatggtaaatcccggcaaggatttcgccatcattgcgcgcttcacctggggcatcctgacctttccagtgccactgcagccagcggccggagttggcgatcgaaccgtcctcttcggcaaagcaggtcgacggcagacggaagacttcggtctgaatcgccgacgggtcgacatcattagactcgccgtggttctgccagaaggtcgaggtttcggtcaccagcgggtcgataaccaccatatatttcagcttgctgaggctgcgaaccactttgtttttgtccgggaaggaggcaaccgggttaaacccctggcagatatagccggtgacgttgccgttatccatcatattgaagtatttgataacgtcgtaagcctggtcccacttcggtaaccactcaaagccccagtcgttctctttttgcgccgcctcgccgtagaaggatttcatcaggctaacgaagaatttcgggtagttgctccagtagttcacctgctcgggcagggtcgccttcggcgtgttggcgctgaggtagctttgcagatcggtctgtttgtccgatggcagcgtcaaatagcccggcagactggtcgacagcaggcccaaatcggtcagcccctgaatatttgagtggccgcgcagggcgttgacgccgccgccggccatccccatattgccgagcagcagctggatcatcgccatggtacggatgttctgcgcgccgacggtgtgctgcgtccagcccagggcatacaggaaggtggtggtgcggtccgcggcgctggttgaggccagcacgtcgcacactttaaggaagtccgctttcggcgtaccgcagatgttttcgaccacctcgggcgtgtaacgggaaacgtgctgcttcagcagattccacacgcagcgcgggtgggtgagcgtttcatcgcgtttggcgtagccgttttcatcgaactggtagttccaggacgatttatcgtactggcgtttttccgcatcgtagccgctgaacagcccctcttcgaaggcaaaatcatcccgcaccagcaggctggcattggtgtaatgcttaacgtactcggcattgatcttattgttttcgatcaggtacagcagcacgcccgacaggaaggtaatgtcggtaccggaacgaatcggcgcatagatatcggccaccgacgcggtacgcgtaaagcgcgggtcgacgacgatcagcgtggcgtcgttattgtttttcgcctccatcgcccagcggaaacccaccggatgggcttcggcggcgttaccgcccatcaccaccacgacgttggcgtttttgatatccacccagtggttggtcatcgcaccgcgaccaaatgttggagcaagacttgctaccgttggtccgtgtcagacgcgcgcctggttgtctaccgccagcatacccagcgatcgcacaaatttttgcgttagcatgccggtctcattgcttgccgccgaggcgcacagcatgccggtggaaagccagcggttaaccgtcacgccctgttcattcttttcaataaagttggcgtcgcggtcggctttcatcagtcgggcgatgcggttaaaggcttcatcccacgagatgcgctgccatttatccgagcccggggcgcggtattgcggataacgcagacggttttcgctgtggacatagtccagcaggcctgcccctttcgggcacagcgcgccgcggctcaccggatggtccgggtccccttcgatatggtagatcgcttctttggcgtttttcgcaccgtcgccgaggctatacattaatagcccgcagcccacggagcagtaagtgcaggtgttgcggatctctttcgcacgcagcaatttgaaattgcgtgcctgagccaacgccattttaggggcaaagcccagggcggcggcggtagttccggccataccgcctgcgcagatcttaaagaactttctgcggctgacgtccattgcattcctccatgcaggatgttgattcatcgcgcggaggaaactaacagcaaaatcccgggaaaatttgcgtcaaatcaaggaggaaaaccttcgcccccttaatcgccagccctggccattttcgctaatccctaagggttagcaacggcggaaaatttcgcccctcaccgataaaaagatgatatatatgccggctgcatttgcgtaaccatcaggaaaagcatggagaaaaagagagccacgacgatcggcttcgccgccattatcttatggagcacgatggtcggattgattcgcggcgtcagcgaaggactgggagcggtcggcggcgcggcgatgatttacagccttagcggcctgctgctgatctttaccgtcggctttcccaacctgcgccagatcccgcgtcgctatctgctggccggcagcgtgctgtttgtcagctatgaaatctgcctcgcgctgtcgctgggctatgccgccagccgccagcaggccattgaggtggggatggtcaattacctgtggcccagcctgacgattttattcgccattctctttaatggccagaaaagcagctggctggtgatccccggcctgattctcgccctgctgggcgttggctgggtgttgggcggtgagcatgggctacagcccgatgagattatcagtaacgtcatttccagcccgcttagctatctgctggcctttgtcggggcgtttatctgggccgcctactgcacggtgacggccaaatatgcccgcggtaaaaacgccattacgctgttcgtcctgttaaccgccctgacgctatggctgaaatttctcgccagcgaccagccgccgatgctgtttagctggccggtggtcattaagctgatgacggtctccgtggcgctggggctggcctacgcggcgtggaacgttggcatcctgcacggcaacgtcagcctgctggcggcggcctcctacttcacgccggtgctctcctctgcgctggcggcgatcctgctgagtgcgaccctgtcgtggtccttctggcagggggccgggatggtatgtctcggctccctgctctgctggtacgccacccgccgttagccgagatcgcctccggctaccggcagcgtcacgccggtgatatagctggcctcatcgctggcgagaaacaggatcgcattcgcctgttccgccagcgtgccgtaccggtgcagcagactgctcgccaccgtctgatcgacgacctgctgataccacgccttttcctgctcgctcggctgctcttcgttacgcggcgtcaggcgcggcggcgcctcggtcccgcccggggccacggcgttaatccgaataccgctgccgctgtactccatggcaatcgaccgggtcagcgcgttaacgccgcctttcgccgccgagtacggcacccgattcactcccgccgtcgccaccgacgaaatgttgacgatgctgcctttgccctgcttcagcatccatggcagcgccgcgcggcagccccatagcgtggggaacagcgagcgacggatctctttctcaatctgctccggctggtattcggcaaaggggcgcgcccagatggtgcccccaacgttgttgatcagcacgtcgatacggccaaaatgagcgaccccggcggcaaacgcctgctcggtactttcccacgcttccagatccgcctccagcgccagcaccagacagccggattgcgccagcgtcgccgccagctcatggacgtatgacgagcgatcgatgagcagcagagccgcgccttctgcagccgcctgctccgccgtctggcggccaatgccctgcgccgcgccggtgatgacgacgactttatcggtaaaacgcattttgtctccttatgccgccgcgctctggctggcgataaatttctcataccagaaccccgccggggtgatcccgcggtcgcgcaacgccgtggcaaccgcgttaaccatcggcggcgggccgcagagatagatgtccacgtcgccgttgttcagcatcgcgtcgtcgagatggtcggtgacaaagccgcgctgcgggcaagtgctgttttcatcggccaccaccggtagccaacgataccccgtcagctgttgaataaaggtatccagcgcgtcggttttcaccagatcgcagtcacgagtaacaccgtacagcagcatcaccggacgctggctgccctgtgtctgcagggtatggagcatggagagcagcggcgccaggccggtaccgcccgccagcatcagcagcggacgttcgccgtggcgcagatagaagctgcccatcgggccgctgagggtaagacgatcgccgggccgcgcccgctgggttaaccactggctcatcatcccgccaggcacgttacggatcagaaaacgcccttcgagggagcccggttgcgagctaaatgagtaggcgcggacatgaagcgtacccggcacctgaatgttgacgtactgccccggcaggaaggccagcggctcatcgagggcgaccaccagttcgatggcggtatcggacagtaaattcacctgccgcacctgcgccccgagcgtcgccagggccgttttgcactgggcagcggccaccggcacatcgatcacgcagtcgctggtcgggaccatctgacaggtcagcacctgacgggcctgcgcttcgtcgtcgcttaacgcctcgtcgagataatcttcgcccaggtcgtactcaccgctggcgcagtggcatttgcaggtaccgcaaacgccgtccgagcaatccatcggcagattcaccttctggcgataggcggcatccaggactttctctccggcattgcactgaataaaacgggttacgccgtcctcaaaattaagagcaatattgaaggtcataagcgcctcttaaatgtggtaaacgtcaatcacctgacggatatagtcgttattcaggcgcacagttttacggacgatctgcggcctgccgtcctgctcaattagcgtgcagcaggtagagccaaaataggcatccgtgtgctgatagcgatggctccaggtgacccagctgtaacgcacctccagaccctcgtcgctttcgcccagcagctcaacgttgctgatgatatgggtggtccgcggctctggcgtgctggccccggagcgctcggttttaatgcggtagacgcgatcctctagcccttcgcggttggggtagtagataagcgaaatctctttttgcgggtcgcgggtcagctggtcatcgtcgccccacgccggcatccagtagaccacctgcgggctgtagcagctgagccattcgtcccactgacgatcgtccagcagacgggcttcgtagtagagaaactggcgaacctgttcgaggttaagcatcaggccacctccacgcgctgggtaatggactggtcgtaacgctgttgttcctgttcaatggccgccagcatcagcgtctgccagtggtggtgatgggcgatgtacagcgcttcgtcctccgatttcaccccgcttaaccgcggcgaaaagccggcatgttgcgcatgctcatccgcgccatcgacccagcgcagcgcgccgcggctgaggtcgctccatggcagattttcgccgagatagccgcgctgacaggcgctgaactcttcgaggtcgtccggcgtccccatcccactgacgttaaagaaatcctcgtactggcggattcgcagcgctctggcctggtcggattcccctttcggcgcaaagcaccagatggtgacttcggttttatccaccgcaatggggcggattacgcggatttgcgtcgagaactgatccatcaggtagacattggggtacaggcacaggttgcgggtttcgttgaccatctggtcggcacggcgttcgccaaattccgcctgcagccgttcgcggtgggcatagaccgggcgcacttccgggttgagcgcccgggtccacaacagcatatggccgttatcaaatccatagccgccgccgaggctttttgaccaaccgttggcatccaccgcgtgcgtcccttccgcttcatagttgcggcgtgacatggttgaggcatagttccagtggaccacgctgacgtgatagccatcggcgccgttttccgcgcccagtttccagttgccctcatatacatagctcgacgaacccttaagtacctcgagcccctccggcgcctggtcgacgatcaggtcaataatcttgcaggtttctccgagataggcctccagcggctgcacgtcggccttgaggctaccgaataagaaaccgcggtaagactgaaaacgcggcaatttttgcaggtcgtgggagccgtcttgtttaaagctcggcggatagccgccggtgctctcatctttggcttttaataatttgccgttattgctgaaggtccagccgtgaaacggacaggtaaacgaatttttattcccggttttgcgtcgacataacatggcgccgcggtgggcgcagctgttaattagcgcgtgcagctcattctttttatcgcgggtaataataaccggctgccgtcccagcgtcagggtataataatcacccggctggggaatttgactttcatgagcgagaaatacccagttaccttcgaaaatatgcttcatttcaaattcaaacagctgcgggtcggtaaatatagagcggtggcagcggtaaatataattttcacggtcgacaactaaggcattattgattttgtctttgagcgtcgagagcgttttttgcatgagtcggtccctcctgcaggattcaggatgaaagaaacagggtgaattcttcgttttcgagtgcaatatctggcccgggcagtagcgtgcccggggccgataatgccgcttactctttggcgcgcacgcggatcccacgctgctcttcgtcggcgctcagcgctttacacagggtgaaatcaaaacaaacctcggtgtgctctccctcaagattgcgctgcgcgatgatctcgcggtcggtcacttttaccggatcggcaatcaggccgtcgcgggtggcaaaggcaaaatcgtcccacaggtatttatcgccattgaggttaatctggctggtcagatgtttatgacccggcgcggagacgaaaaagtgaatgtgcgccggacggttgccgtggcgacccagtctgtccagcagtttctgggttgggccatccggcgggcagccgtagccggagggcatgatgctgcgcacgctgtagcggccatcggcgccggtgcggatccgccggcgcaggttgtactcactctggcctgggtcgaagaaggaataatttccgagggtgttggcgtgccagatatcaacaatagcgttggccactggccgaccttcggtgtctttgacttcaccgtgcagccacatcacttctccggcgtcggcgccatcatccatgcgggcgtgaccctcggccagcggcgcattagccacgtacagcggcccttcgatggtgcgcggggtgccggtttcccgatgcgctgccgcgtcgatggcgtcctggcgcagatcgaggaaatgctccagtcccagacccgccgccagcagcgccgcctcctggcgcccgcccagctcgtgcaaatagtttaccgcgtgccagaactcttcttccgtaacgttatagtcgtcgatgagcgtgcagatattttccagcagacgatgaataatcgccttaaaacgttcatcgccgccggcaacatctaatccggcactgtcgcgtaataatttctgaatagctggttgttgtacgaatacattactcatactggttctctcttatattttgcagggtatacgccggtaataccggcgtgaggtcagatattattattagcgatcgtcatcgcgaattgatgacggatgacgacagagggcttccacttttatcgccataaagggatatagcggcaatcccattaatatttgatgcaattcttcggcatcttgaacatcgaaaatactgacgttggcataaaggccggcaacgcgccagatatgccgccatttgccttcccgctgtaattgttgcgaataggctttttcgcgttgttttatttcctccgcctcgttggcgggaaagccaggcggaatattgacggtcatctccactttaaataacatttttttctcctgttccccgctacggctggcgggtataaaaatgcagtttgtcttcatccagctcgacgccaagtcccggcgtttgcggcagcgccacctgaccgtcggcaaaggtgagcggcacgctgacaatatcgtctttcagcaacagcgggccgaacatctcggtaccccactgcagcggcagcgtcgaccaggcgtgcagagaagccacggtccctacggtgccttccagcatggtgccgccgtacaggccaatccctgccgcctgcgcgacgcgggccagcgccagcacgctgttcggccccccggctttggcgattttcagcgcataagcgccggtaaagccctgctgcgccagctgataaccatcgtaagcggtcgcgaccgcttcatccgcgaggatcgcggtttcaatttgctggcttaaccgcaccagggcggcgttatcgtgggcgctgaccggctgttcgataagatcgacgcccatcgccgccagttcgcggcagcctttcgcgccggtggcggcgtcccaggcctggttgacgtcgacacggatgctggcgcggtcgcctaacgcttcaacgatggcgcgggtatgacgcaggtcggtggcgagttcacgcgcgccgatcttcagtttgaacgcccggtggcggccttcggccaacagtttttctccttcagcgatatctttcgcggtatcgccgctggctaaggtccacagcaccggcaacgccgtttgcagcgcgccgccgagcagggctgataccggcagacctaaggctttgccctgagcgtcgagcagcgcggtttcgatggcggacttcgcaaaggtgttgcctttaatggcgccgttcatgcgggcggtcagcgcattcaggttatcggccggctgcccttttaacagcggcgtcagataatgggtgatcgccgacgagatggcctcggggctctcaacgccatagctcaagccgccgatggtggtggcttcgccgatgccgcagatgccgtcggaacgggtaaggcgcacgatcaccagcgactggcagcccatggtggtcatcgacaatttatgcggccggatggtcgggacatccacaatccagctctcgatttgctctacggtggcagtcattttctgttcctgatgagatatataactttttgtacccacatccataacgggggtctgtgccattgacaatagggttcagcctggcggatggtcaacggcgataatcgaaatgttgtgcgattatcgacgcgtttgttaaaagacggttattaatgtgatcatggtggtaaaaccggcacaattcagcgcgccccattttgcgcaaggtatagtgatctgccgtgagctttacgctgcaacggagaaggatgcgatgagcgacaatatacccaatacgctgagcgccaggcaggccgagcacgaccctaactttatgctgtctctggcccgcgggcttgaggtccttaacgccttcaccccccagcgccagcggctgaccatttcccagctcagccagaaaacgcaaatctcgcgcgcggcggtacgccgctgtttgtataccctcgccgcgctgggcatggtgcacagtccggatggccgtagctatgaactgctcccccgggtgctggccgtcggccacgcctatctggcaggcacgccgctggccaaggtggcgcagacggcgctggataatcttggcaaagcgctcggcgaatcctgttcggcggccacgctcgacggggataacgtgctctatattgcccgcgcggcggtcaataatttactgagcatcgatctggggcgaggcagccgcctgccggcgtgggccacgtcgatggggcgggtgttgctgagcgcactgccggaggaacagctggaagtgacgttgtcacgggctacgcttattcgctacactccgcataccctgtgcgatttgtccggtttacgtgcagagatcgcccgggtgcgcatgcagggctatgccctcgccgaccggcagatcgaggtaggcttgtgctcgctggcggtacccgtgctgtcgcgtcacggtcaggtggtggccgccctgaatgtcggggtacctgccgcgacggtcagcgccgcggcgttaaaagagaaggctctcgccccgctacggcgcgcggcgatggatctgtcgctgcagctatagcgccgactgcggtttcgccacggtggcgaggctgcgccagatcccggcggccagcagcagaagcaatacacccgccgtcgccagcaccaggctatgagcctgaataaaagccgtcttcgccgccgccatcagcgcctgcgccaccccggcgggcagcgcctgggacagactcaccgcctcgccaatcgatgacgccgcctgctgcgccatggcgccactcaggccagacggcagcgcaatagaggcgctgtagctgcgggtcaggatcaggccgaacagcgctatgccgagaccggcgcccagctcataggccatggtttcaatcgcccccgcggccgccgctttctccttcggcgctgccgccataatcgcggaactggaggccagcagcgcgctggccacgctaaagcccagcagcgtcatcagcccccaggccagccactgctgggtactgaaatcggtcaacgccaggccgagaaagctgaaggcgctgagcagcatcccgccggtcgccacctcgcgcagcccaagccgcgacaccagcaggccggcaatcgggccgctgaagccgctggccaccattaccggcagcataaatatccccgcctcgaacggcgttttctggtgcacaaactgcagctcctgggccatcagcagctcaaaaccgaccagggtaatcagggccgtcatcgccatcatcaccccgcttaagattatgcgatgggtgaacaggcgcatatccaccatcgggcgggccgccgacagctgcttgcggataaaccaggttaacatcgccgccccgccgagcgccaccagcgcggtgagccacagcgccagctggcccttcagcgccgatttcgcgctaaacaccagcatcaggatcgcggcaatcaaaacgagcgcctgcagtagattgagcggctgttcgcggcgcgcgggctggcgcggcaccactttcgcgttaatcgcgataaccaccagcacgatcggcacattgatcaggaacaccgacccccagtagaaatgctccagcaggatacctcccaccagcgggccgaaggccgcgccgccggagccgaccgctgcccacagccccagcgccatattgcgctggctggcctcggcaaaggtgctgcggatcccggccagcgtcgccgggacgatcatcgccgcccccaccgccagcaaagcgcgtgaggcaatcagcgtcatggccgtcggcgacagcgcggcgcacagcgaggcgatgccaaaaatggcgctgccgagcagcagcaggcgcttaaagccgatcttatcgccaagggcgcccatcggcagcaccatcccggccatcactaatgagtagatatcaatgatccacaacagctcattgccgctgctacccagcgccacgctgagggtcggcgcggccacatgcaacaccgtagcgtcaatcgccaccggaatataaaccagcaaaatcgccatcagcgtcatccattgccgtgacatagcttgtacctcaatcaatattgaatattggacacacgtccaggatggcgatcctgccggattgttgaacacatgtccaactttttgttacactcggccaaagccagatgacagcggggttctatgcactatttacaacgtgatgcgcgacgggaagggattatgcaggccgccatgcgcctggcgctgcgcggcggctttgccgccatgaccgtgcggcagatcgcccgcgaagcccaggtggccgccgggcagctgcaccaccacttcacctccatcggcgagctgaaagcgcaggttttcatccgcctgatccgcgagatgctcgacatgccgctggtggctgaggacgccagctggcgcgagcgcttgttctcgatgatcggcagcgaggatggccgactggaaccctatatccgcctgtggcgcgaaggccaggtgctggccgacagcgatccggacatcaaagcggcctacctgctgaccatgaatatgtggcatgccgagaccgtcgccatcatcgagcagggcctcgccagcggcgaatttcggtcggctgagcccgcggcggatatcgcctggcgctttatcgccctggtgtgcggcctcgacgggatttatgcgctggacgcgcaggccctggatgaggcggcgtttagccgctatgtaaataagatgattacgctggagttgttttaggcatatttacatttagtaacaattaattccgctacgcttaccacgtgctctctgtcagcacgttttttttatctacgcttcatagataacgcaaattaagcgttattcactatccccttgtattcagctgttgaccttatttatttactcctttccgggcaagtagagggcaatatgtcggtgcagaatgataaagataatcattaccttttgaacaactggcggcctgaaaacaaggcgttctgggaaaataaaggccaagccattgcgcgaagaaatctatggatatcagtggcctgcctgctgcttgctttctgcgtatggatgttattcagcgccgtagcggtcaatctcaataaagtcggttttcatttcaccaccgaccagctttttttattaaccgccctgccttcactttccggcgcgatattacgggtcccctactcctttatggtacccctttttggcgggcgctactggaccgtattaagtaccgttatcctgatcgtgccttgtatttggttaggggtggcaatccagaatattactactccgttctgggtatttattattattgcgctgctgtgcggttttgccggagcgaattttgcttccagcatgggaaatatcagtttctttttccccaaagcgaaacagggcagcgcgctgggagtcaacggcggccttggcaatctgggcgtaagcgtgatgcagatggtcgccccggcggtcatcttcctgccgctcttcacctttctcggcgtccatggcgtcacccagcccgatggttcgacaatcaccctgagtaatgcggcgctcgtctgggtaccgctgctgctgctcgccaccgtcgcggcatggttcggcatgaacgatatcgccggttcaaaggcctcgattcgcgatcagcttcccgtgctcaagcgaccgcatatgtggctgttaagcctgctctatctggcgacgtttggctcgttcatcggcttttccgccggctttgccatgctggcgaaaacccagtttcccgcggtcgatatcctcaagctcgccttctttggaccgttcatcggcgcgctggcgcgctcgttcggcgggatcatctccgaccgtctcggcggcgtgcgggtgacgctggttaacttcgtcctgatggcgctgtttaccggcctgctgtttctgaccctgccaggcagcggctccggcagctttctcgctttctacgtggtgtttatggggctctttttaaccgccggtctgggaagcggctccaccttccagatgatcgccgtcatcttccgccagctcaccatcgacagcgtaaaacagcgcggcggcagcgatgaagaagcgcagcacgaggcggtgaccgataccgctgccgcgctgggctttatctcggcgatcggcgccatcggcggcttctttattccgaaagccttcggcacctcgctggcgatgaccggctcaccggttggcgcgatgaaagtcttttttgtcttctatgtggtttgcgtgctggtgacctggctggtctacggccgccgtaaatccgcttaaccataacgatttatctgtcggatagcggcttacgccttatccggccttacgagttcgttcgctcatccggccgggtggcacgatgccggacattatcggagcaggagaaatgtcatgagtaaacttctggatcgctttcgctactttaagcagaagggcgagacctttgccaacggccacggccaggtctacaacaacaaccgtgactgggaagatagctaccgtcaacgctggcagttcgacaaaattgtccgctccacgcacggtgtgaactgcaccggctcctgcagctggaaaatttacgtcaaaaacggcctcgttacctgggaaacccagcagaccgattatccgcgcacccggccggatctgccaaatcacgaaccgcgcggctgcccgcgcggcgccagctactcctggtatctctacagcgccaaccgcctgaagtacccgctggcgcgtaaacgactgattgagctgtggcgcgaagccctggcgcagcatcccgacccggtgctggcatgggatagcatcatgcaggatccggcaaaaacccgcagctataaagcggcgcgcggcaaaggcggttttgtccgctccagctggaaagagctgaaccagctcatcgccgccgccaacgtctggaccatcaaacattatggcccggaccgcgtcgccggcttctcgccgatcccggcgatgtcgatggtctcctacgccgcgggcactcgctatttatcgttgattggcggcacctgcctgagcttttatgactggtactgcgatctgccccccgcctcgccgatgacctggggcgaacagaccgacgtgccggaatccgccgactggtacaactccagctacattattgcctggggctccaacgtgccgcagacccgaaccccggacgcccacttctttaccgaagtgcgctacaagggcaccaaaactatcgccatcacgccggactattcggaagtcgctaagctctgcgaccagtggctggcgccgaagcaaggcaccgacagcgcgctggcgatggccatgggccatgtgatcctcaaagccttccacctcgataacccgagcgattactttctcaactactgccggacctacaccgacatgccgatgctggtgatactcgagccgcgcgacgacggcagctatacgccgggccgtatgctgcgtgcttccgacctgcttgacggtctcggagaaagtaataacccggaatggaaaaccgtggcctataacagcgacggcgaactggtggcgccgaacggctccatcggctttcgctggggcgaaaaaggcaaatggaatctcgaacaacgggcagacggcaaagatgtcgagcttaagctgtcgctgctggatattcgcgacagcgtggtgtcggtgggcttcccctactttggcggcaacgaaaacccgcattttcgcagcgtagcgcagtcaccggtgacccttcacccgctaccggctaaacagctgacgctggccagtggcgaaagcggcctggtggtcagcgtctatgacctgattctggccaactacggtctggatcgcgggcttgacgatgtcaatgcggcgaaggatttcgccgaggtcaaagcctataccccggcatgggcggagcagatcaccggcgtaccgcgtcaacatatcgaacaaatcgcccgcgagtttgccgatacggcgcataagacccacggccgctcaatgattatcctcggcgccggggtgaaccactggtaccacatggatatgaactaccgcgggatgattaatctgctggtattttgcggctgcgtcggccagagcggcggcggctggtcgcactatgtcggtcaggagaaactgcgcccgcagaccggctggctgccgctggcgttcgccctggactggagtcgtccgccgcggcagatgaacagtacctcttatttctacaaccacgccagccagtggcgctacgaaaaactgaccgcgcaggagctgctgtcgccgctggccgacgccagcaaatttagcggcagccttatcgacttcaacgtccgtgcggaacggatgggctggttaccctctgcgccccagctcaacgtcaacccgctgaccattaagcagcaggccgaggccgccgggctctcccccgcggagttcaccgtccagtcgttaaaatcaggcgatattcgctttgccgccgagcagccggatagcggcaaaaaccatccgcgcaacctgtttatctggcgctcaaacctgctgggatcgtccggtaaggggcatgagtacatgttgaaatacctgctcgggaccgacagcggtattcagggtgatgaactgggcgccagcgatgaggtaaaacctgaggaagtcgagtggcagaccgcggcgattgagggaaaactcgacctgctggtgacgctggatttccgcatgtccagtacctgtctcttctccgatattgtcctgccgaccgccacctggtatgaaaaagacgatatgaacacctcggacatgcacccgtttatccacccgctctccgccgccgtcgacccggcctgggaggcgaaaagcgactgggagatctacaaggatatcgctaaatccttctcgcaggtctgcgtcggccatcttggcaaagagaccgatgtggtgctggtcccgctgcagcatgattcccccggcgaactgtcgcagccgttcgaggtgcttgactggcgcaagggcgaatgcgatctgatccccgggaaaaccgcaccgtcgattgccctggtggaacgcgactatcctgccaccttggaacgcttcacctctctcggcccgctgctcgataagcttggcaacggcgggaaaggcatttcgtggaatacgcaaagcgaagtcgatttcctcggcaagcttaactacgtcaagcccgacggtccggccaaaggccggccgcggatcgacagcgccattgacgcctccgaagttattcttagcctcgccccggaaaccaacggccaggtggcggtgaaagcctggcaggcgctgggagagtttaccggccgcgatcatacccatctggcgctcaataaagaggatgagaagatccgctttcgcgatattcaggcgcagccgcgcaaaattatctccagcccgacgtggtcgggactggaaagcgagcacgtctcctacaatgccggttataccaacgtgcatgagctgatcccatggcgcaccctctccggccgccagcagttgtatcaggaccatccgtggatgcgcgcctttggcgaaagcctggtagcctatcgcccgcccattgatacccgcagcgtcagccagatgaaggccgtgccgccaaacggctttccggaaaaagcgctgaatttcctgacgccgcaccagaagtgggggatccactccacctatagcgaaaacctgctgatgctgacgctgtcgcgcggcgggccgatcgtctggcttagcgaaaccgacgcgaaagagctgggcattgaagataacgactggattgaagcgttcaacgccaacggggctctcaccgcgcgggcggtggtgagccagcgggtgccgccggggatgaccatgatgtaccacgctcaggaacggattatgaatatcccgggttcggaagtgactggtcgtcgcggcggcattcataactcggtaacccgcgtctgtccgaagccaacgcacatgattggcggctacgcccagctggcctatggctttaactattacggcaccgtcggatcgaaccgcgacgagttcatcatgatccgcaaaatgaagaatattgcctggctggatgacgaaggtcgcgatcaggtacaggaggcgaaaaaatgaaaatccgttctcaggttggaatggtgctgaatctggacaaatgcatcggctgtcacacctgctcggtcacctgtaaaaacgtctggagcagccgcgaaggcatggagtacgcgtggttcaataacgtggagaccaaaccgggcattggctaccccaaaaactgggaggaccaggatcagtggcaaggcggctggatccgcggcattagcggtaagctgacgccccgcctcggcaatcgggtcagcgtgttatcgaagattttcgccaacccggtgctgccggcgatcgacgattactacgaaccctttacctacgactaccagcatctgcacaacgcgccggagggcaaatatctgccgaccgcccgcccgcgctcgctgatcagcggcgagcgtatggataagattaactggggcccgaactgggaggagctgctcggcggcgaattcgagaaacgcgcccgcgaccgtaacttcgaagccatgcaaaaagagatgtacggccagttcgaaaataccttcatgatgtatctcccgcgcctgtgcgagcactgcctcaacccgagctgcgtggccacctgcccgagcggcgccatctacaagcgtgaggaagatggcatcgtactgatcgatcaggataaatgccgcggctggcggatgtgcatcagcggctgcccgtacaaaaaaatctactttaactggaagagcggtaagtcggaaaaatgcatcttctgctatccgcgcattgagtccgggcagccaacggtctgctcagaaacctgcgtcgggcgcatccgctatcttggcgtactgctgtatgacgccgaccgcattgaagaggcggccagcaccgaacatgaaaccgacctctatgagcgccagtgcgaggtgttccttaatccaaacgatccggcggtcatcaaggaagcgctaaagcaaggcatcccgcacaacgtcattgaggcggcgcagaaatcgccggtctataagctggcgatggactggaagctggctctgccgctgcatccggagtatcgcaccctgccgatggtctggtacgtgccgcccctgtcgccgatccagtcggttgccgacgccggcggcttaccgagcaacggcaacatcctgccggcggttgagagtctgcgcatcccggtgcaatacctggcgaatctgctgagcgccggcgataccggaccggtcttgcgcgcgctgaaacggatgatggcgatgcgccactacaagcgctcgcaaaccgtcgagggcgtcaccgatacccgcgccattgaagaggtgggcctcagcgttgagcaggtcgaagagatgtatcgctatctggcgatcgccaactacgaagaccgcttcgtgatccccaccagccatcgcgaactggcggaggatgcctttccggaacgtaacggctgcggctttaccttcggcgatggctgccacgggtcagatacgaaattcaacctgtttaacagccggcggatcgacgccatcgacgtcagcggcgtgcgtaagcatggggagggcgagtgatgcggatcctgaaagtgatcggtctgctgctggagtaccccgacgagttactgtgggagaaccgcgacgacgccctggcgctgatcagggccgatgtcccttccctgacgccgtttgtcggtgagctgttgacggctccgctgttggatcgccaggccgaatggtgcgaggtgttcgagcgcgggcgcgccacctcgctgctgctgtttgaacatgtgcatgccgaatcccgcgaccgcggccaggcgatggtcgacctgatgaatcagtatcagcaggcgggtctgcagatcgattgtcgcgagctgcccgaccatctgccgctgtatctggagtatctcagtattctacctcccgcggaggctcgggaggggctgcagaatatcgcgccgattctggcgctgatcggcggccgtcttaagcagcgagcctgcccgtactaccagctgtttgacgccctgctggcgctggctaaaagcccgctcaccagtgacagtgtcacaaaacaggtggcgggagaaaagcgcgacgatacccgtcaggcgctggacgccgtgtgggaagaagagcaggtgaagtttatcgaagataatgcgaccgcttgcgatagctcgtcgatgcaagcttatcaacgacgctttagtcaggatgtggcgccgcagtacgttgacatccgcgccggaggcccgaaatgatccagtatctgaatgtcttcttttacgatatctacccttacctgtgcggcaccgtctttctggtgggcagctggctgcgctacgattacgggcagtatacctggcgcgcctcatccagccagatgctggataagcgcgggatggtgctatggtcgaacttatttcatatcggcattctcggcatcttctttggccatctctttggcatgctgaccccacactgggtctactcgtggttcctgccgatgtcccagaagcagctgatggccatgatccttggcggcgtatgcggcgtgctgaccctggtaggcggtatcggcctgctgatgcgccgcctgaccaacccgcgaattcgcgccacctccacgaccgcggatattttgatcctgtgcattctgctgattcagtgcgcgctggggctgacgaccatccccttctccgcccagcatccggacggcagcgaaatgctcaagctggtggactgggcgcaggcggtggtcaccttccacggcggcgcctcggcgcatctggacggtgtcgcatggatttaccgcgtccacctggtgctcggaatgaccatctttctgatcttccccttcacccgcctggttcacgtctggagcgcgccggtggagtatttcacccggcgttaccaggtggtacgctcccggcgctgagcgctggcggcgtttaccattcatccttaccggtagcccggacgaggccttcgcgccaaatccgggtatttatcgtacctgactccaggctttatgccggatggcggctacgccttatccggcctacaggggcctctcacaggctcaaacctcgcaggcccgcgcaggcgcagcgccgccgggcaagatatcagacacggtacctgtaattccgccgggtggcggctacgccttacccggcctacagggtcctctcacaggctcaaacctcgcaggcccgcgcaagcgcagcgcccgccgggcaagatatcaggcacggtacctgtatcgccgggtggcggctacgccttgcccggcctacaggggcttctcacaggctcaaaccccgtaggcccgcgcaggcgcagcgccgccgggcatgaggagatttacttcccggcttccggatgggtatcgaacgccgccatcaccgccgccagcgccgcttcgctgaagccatgtttaggatcgtccacccccaggccgaaacgggtctgcagcgcttcatacagcgcggagacatcggcaaaatcgaccttctccaccacatggttattctcccagtgggtaaagtggaagttggtgagggtcattttgccgccgtccgggagatgacgacacatcagcagatggtgacggaagtgggactgcggccagtgcgccgaccagaaattgcccatcacataatcagacgcatactggcggcctaaatcgaaatggtacatcgactgccagtgttcgtgatggttgaactgcagcgtccactcatccccttcatgcaccagacgatagctgccgtgcggcgtttgctgtgggatatcggccagcagtttgatcggcgcggtcagcgtctggccgccgaagccgacgtcggcgatccagcgctcccccgccacctccaccagcaacagacggtgagtacgcggcggcatctgcggcgggttggccagcaccacgcggcccagcaggctgcggacgttaaagcctatctcgcgcagcgcgcgctccagcaggccattctgttcaaaacaataccccccgcggcgggcggcgatcagcttctcttccagcgccccatcgtcaaggtggatttcacgcggcagcaggacgtcgaggttttcaaaggggatggcgctgttatgctgcagatgcagttcccgcagggtatcaatggaaacatcaggctcacccgtccagctcagacgggaaaaataggcgcgtaaaaagggactcatcagggcctccagctgtaggtgtccgacatttatagcctatttttccgcgccgaccgtcttttttgtgcgcttagcgttaaccgcacgtgcggcgctgcatcagcgccagcgccgtcagcatcaagaccaggccggtcaacaacgtcaggctggccatcgccatgccctgaccgacggaaccctgttcgaactggcgccagataaacaccgccacggtttgcgtaccggccggagagagcagcagcgaggtcaccagctcccgggaggccaccgcgaacaccatcagcatcgccgccagcagcgccggaaagaccagcggcaggacaatcaaccgcagcgcctgcagtggcgacgccccatgcaccctggcggcgggctcaaggttcgggcccagctggcgcagcgcgctgccgacatagcgcaccggccagggcaacagcaggcagcaataggagagcagcagcatccacagcgtgttatagggcgagcgcggccagaagggctgattccacagcaggatcaaaccgacccccaccaccacgcccggcagcgccgccggcatcagcgacagcgcgtccaccatcccgcgccctttaatcttctgcaccatcaccagccaggcggccagcaggcccagcgcgccgacgattagcgccgaacccagggccagcgacaggctggtgccgagggccgacagggcatctccctgctggtcaaacagcgccgcgaaatgacgcagtgtgacattctcaacactcacgccaccggagagcgtgcccatcacgctggtgagcatcatcgagacggcggggacgccgaccgccaggccgccgacggccgccatcgccagcacggcgggcagcatcatccagcccagcgatgccccgtggttctcccccggcttaccggtgatgctggtgacctctttctcccccaccagccgcctttgcagccaccaggcgaacaacgccaccgccatcagcagcagcgacaatagcgcggcgccagggagatccaccggccagtcggccagctttttctcaataccgaccgtcagcatcaccactcccgcccggctgcccagcgccgccggtacgccaaactcctcgatggcgagggtaaacgccagcagcatccccgccgccagcgccggagagagcatcggtagcgtcacgtgccagaaggcgcgccaggcgctggcgccatggacgcgggcgaccaccgccagccgggtcccgctcgccagcaggctgcgggagacggcaaagtagaccaccggaaatatattaaaggtcatcaccagcacgatcccgctgcggctgaacagcagatcgttcagctgccagccggtcagctgctgcagatagccctggctttgcagggccagcatccaggagagcgccgagatatagggcggcgtcagaaaggggatcaaaaacaggagatcccacagccggggcagcggcagcgaaaacataccgcgcaggatgccgagcggcaggccaatcattacgctgaccagcgccacgccggcggcgatccacagcgtaccgccgagcatcgccggcagctgaggatcggccagcagcgccgggatgccgccaaaggcgtccccgagcgaaccggcgctaaaatggggaaaaatcgcctgcagcagaataaacactaacggtaacgcgaccagcatcaccagggcggcaagggtcgcgccggaaaggaatgtttgtttcacaaccggttcctgaagctgagggtcctccggcggccagcgccggagaaacgggatcaattactgcgcgtacagctgactgaagcgggcgagcacggcgccccgctcgctgctgccctcgctggtggtgggtagcaccttcagcgcgtccagtagcggacgtttagccgccacgtcgcggcgggcgggcatcagccaggcgtcggcgaccttcgcctgaccttccggcgacagcacgtaatcgataaaggctttggcctcgccgggatgctggctggttttgaggatcatcatcgggcgcggggcaatcaccgttccgctggccgggaagatcaccttcagcgactcgccctgctgaatattgccgtaggagacataatccaccgcgccaaacaccgccgctttcgctccctgcatcaccggcgtcaccgcctgggcgttgggtccgctgactaccatgccgttctttttcagatcgtcaaacagttgccaggcctggtcgcccatgctgttttgcagcccgatcagcaaatccagcgacgcgccggagagcgccgggtcgggggttgtcaccttgtctttaaacgccggctgggtgagatcccgccactctttcggttccggggtgccgcttttactgttccagacaatacccagggcggagacgccctgggcgatatagtccgccgatttcaggttcgccggtacctggtcggcgttggcgctcgcaaaaggcaacaaccagccccgctggtgcagatcttcggcggtatcccacgaggcggagatcagcacatccgcctgcgggttggcctgctcggcctccagtcgggccatcactttgccggtggtggcctgaaaaacggtcaccttcaccccggtctgttgttcaaaaccgctggccaggcttttcgccagcgagccgggtccggcggtgtaaacggtcagcgcatgggcgctggagagcatcatggcggagagagccatcgcgagtaccactcctttcttaacggtcataacggtgttcatgcaacttcccctgaggttggcgtaacggcgcggacagcggccacgcggcccgcggataaatagacaacctggtcggctaacagctcggcttcatgtcggtcatgggtgacatacagggcggtgatgccgagctgtcgcagcaggcggctcatttcgccacacagcgattcgcgtagttcgctgtccaggttggagagcggttcatcaaacagcagcacccgcggcgcggcgacgatcgcccgcgccagcgccacccgctgctgctgaccgccggagaggcctgaaggcttacgttcggcaaagccattgaggcctacccgcgccagcgcctcgctgacccggcgctcgcgttcgctgcgggagacgccgcgcatgcgcagcggaaaggcgacgttctgcgccacgctcatatgcggccagagggcataatcctgaaaaaccatgccgatatcgcgctgctccgggggcaatccccatcctgcgcgggcgaccagcctgtcgccaaagcggatttcgccgctggccggcacgctcagcccggccagcagacgcagcagcgtgcttttgccgcagccggaagggcccagtagcgccacgatgcggccgggttcgatatgcaacgtgaagcggtcaagaatgggggtctctgcgaaggcgaaagagacctcctgcagggtgataggggtcagcgtgcgcatcatcgccctccctttcgggacagcgagaccagcccggcggtcgacatccgacggggcacgctcacctgggatagcatcaggggagccaacatattgtgatcctctttgggacttagtgctggcgactatagtcagacgagatgacgtattgattacattttcattgcggcttaacgtgttacctgccaaccgacccattattcaaggaacgcctatgagccgctttcgccacgttgaactgcagtacgccagccgcctgctcaaccacggcccaaccattttgatcaccagctacgatgccccgtccgaccggcgcaacgtaatggccgccgcctggtcaatgccggtggaattcgccccgccgcgggtggctatcgtggtggataaaagcacctggacgcgggagatcatcgagcgcaatggcaccttcggcattgtggttcccggcgtcgccgccgccagctggacctacgccgtcggcagcgtcagcggccgcgatgaggacaaattcaatgcctgggggatcccggtagtaaccggtccggagctggggctgccgctgatcgaggagaaatgtctggcatggatggagtgccggttgctgccggcgacggcggcccagacccagtacgacaccctgttcggggaggtggtctctgccgccgccgatgagcgcgcgttcgtcaccggacgctggcaattcgacgacgataagctcaataccctgcatcatctgggcaccggcaattttgtcgccagcggccgtcatgtgcgggcaaactccctcgacgaataagcgtgacttgccgcgggcggccggtttttcccctgcccggcctgcggcccccttttaacccggtgggcggcggcgatcggcgctgggggtcaggccaaatacttttttatacagggtggtaaagtggttgctgttggcgaagccgcacagataagccacttcggtgatggtcatctccgtttcgcgtaatttgacccgcgcggagaccagccgcagacgtttcagataattatccggggttaatccggtggcctctttaatatggcgaaacgcggtgcgggtggtgagatgaaattgctccgccagctgctgccagttatgttcttcgaaacagtgctcctgaagccaggtgagtaatttatgcagtttatagcgagtgctgctatattcggcttccgactcggctgtgagaatggtggtcaccagctggaaaaagagagactcccgtagcggggtattatccgccgccctcagcgccggggaaaatatcttttccaccagttcccggcaatagctgcgagtctccggcgccagccagccatagcaggcggcgcgctgcgcggataattgctgcagcaatccctccatctgctgtaaatagccaaaggccaccgccggattaattaagacattaatcagcttcagcgtccccagctcatcataataatgcacatcgccaggctggacgtaaaatacgtctccctgttggatatacagcgggcgaccattaataacgtgtaacccatgcccctcctcgacgatcaccagttcggcaaattcatggccatgctcctggctattatcctccgggtcactggcgtacatgccgagcttatcctggggatgggtgaaataatactcaacggtcagtgtcatcattacagcaaatcctgaacaacctatggcgcaggggcacgataatctattccggccctcggcacgcgcccgatgtgcggatttgtgatcgccagcgcccccacctcattattcctgccattttcactgacggtttggcattgccagagtggtagccgcgccggacgacggcctatgctgcgcctaacctaacggagaggacgcagtatgtcacaagcaattcaatacaattccagcgtggcgatgatccgtcatccgcgctttttacagcgtgcggccgacctgacgcccgcgctgcaacgcctgcgccagacgccgcaggccatcgtcgaggccgtcgctgaaccaggagcgctgaacggctggcgggggaataccgtccgcacgccggaacagttttatcagcaaccgctcaacgtcggcgacagcatcattattgattttggcagccattttgttggctacctgcagttcagctgccgcagcgtcggcagcccgcccgatgccccggcacatctgcacttcaccttcggcgagacgctgagcgaagtctgtgagccgttcagcgaataccatggatggctgagcagcagctggttgcagcagcaggatctgtggcttgacgtcctgcccgcccgggtcgctctgccacgtcgctattgcctgcgctacctgaaggtggaggtcaaagcgctgtcgcgcaagttccgtctgcagttcgatgagatcgctctggaaaccgtcacctctgccggcagcccgcacccggcggtcatcgccgatccgcagttgaaggccattgatgacgttgccgttcgtaccctgaaaaactgcatgcaggaggtgtttgaagatgggccgaaacgcgaccgtcggctgtggctgggcgacctgcgcctgcaggcgcaggtgaatgacgtgaccttcggccaccacgatctggtccgccgctgcctgtatctctttgccggccatacccgggaagatggcatggtttccgccaatgtctttgttcagccagaggtacgcgccgatgacacctttctgtttgattactcattgttttttgtcgacgtgctttataactacctgcaaagcaccggcgacacggaaaccgtcggtgagctgtggcccacggcgcggcggcaaatcgagctggcgctgacccgctgcgattctcaggggctggtgcgcgacagcgatgactggtgggtatttatcgactggcaggcggagctgaataaacaggcctcggcgcagggggtgctcatctactgtctgcagcgcgccctctggctggcgcagcgttttgaaccgcagcgggtacctgactacactgccacgctctggcagctgaaggaggccgccctccaccatctgtgggacaacgagcggcaggtgtttatcagcggcgccgtgcgtcaggtctcatgggcgtcgcagatctggctggtgctggcggaagttggcaccgccgggcagcgtcaggggctgatgcgccgcctgcagcagcagccgcccgccattgccatgaacaccccgtacctgcgtcatcatcacattgttgccctgctacagtccggcctgcgcgaggaggcggtggcggagatcaaagcctactggggggcgatggtcgcctacggcgccgacaccttctgggaaattttcgacccccaacatcctgacttttccccgtatggcagtaagcttatcaacagttactgccatgcgtggagctgtaccccggcctggtttattcgccagtacggactttaacaacaacgataagcgagtgatttatggcagaaacaacgtttaccctgtggcggcagcgccttggctatggcattgccgatctctcctgcaaccttgtgtggcagatgatctctctgtatctgatgttcttttacaccgacgtcatgggtctcccggcctattatgtcggcctgatgttcctggtcacccggctggtagacggcgtggccgacgtgctgatggggctggtgatcgacaataccaccacccgctgggggcgctgccgcccctggctgctgatcggcgccctgccttttggcctgctgtgtattctggccttttatgtgccggatttcggcaccaccggcaaactgctgtacgcctttgtcacctatctgtgtctgtcgttcctctacaccctggtgaatattccgttctgcgccatgctgccgtttttaaccagtgattccgcagaacgcaccacgctgtcggcggtgcgcattttgctgggctcccttggcgccaccatcgtcgccgtggctacgctgccgctggtcggcatgctaggcaaaggcaaccagcagcagggattcctctataccgcggtgatttttggcgtactggcggcctttttcctgctggtgagctttcgcaacgtcgaagaaaagatcacccttaccggggagcgcatgaccctgaaacgcgcctggattagtctgcgcgccaatcgtccgtggtgggtcttcgccagcaatatctttctgatgtggggtgcctttttctttcagaccggggccctggtgtacttcttccattattacgtcgggaataccgagctgacggcggttatcgccgggatctccaccttcgttcccctgctcggcaccctcaccgtcccgctgctggcccgacgcatgaaaaaacgtcatgtctatctggtggccagcgcggtcaatctgctcgggatggggattatgatggtgtctggcgcccacgttctgggactgatcgtcggggccgtgatcctctccctcggcgccggccaacgcacggctatctatttctcgatgcaggccgacccggtggattacggcgtgtggaaaaccgggattaataccgcagggatcctgacctcgataaacggttttctcggcaaggtggcgatggctggtgccggggctatcaccggcgtgctgctctcctccagcggctatatcgccaaccacacgcagagcgacagcgccctgttggccatcaaggcctgctatctatacattccggcgctattgatcctcgcctcgatgctgtggatgggccgcttctaccgcctcgacgatcagtatgagcagattcgtgccgaccttgatgccggacgcggcgcctcgccagccccggccccgaccgccggagaatcccccgccatgtaaggcgcccccgctgatttaacctctggataaattaaggatttttatgcgtatctctgtgattagcgcagcggtttgctgcgccctttttccgctcatcagcgtcagcgccgccggcttgagcgtggagcaacggctggcgcagctggaagcgcgcctcaatctcgctgaacagcaggccagcgaggccagccgccgcgcgcagcgggcagaacagcaaactgccgccgccgagcagcgcgccgcggcggcggagcagcaggtgcaggcgctcagccagcagaccacggctcgcgaacaaaaacagcaggccactaatcagcaactgagcgagcagctggcgaagcgcgccccggacgatgggtttacctttaacgcctacgcccgttccgggatgttagtcaacagccatggtaaaggcgcccgcggcgggccgggcgtctccccggccagttcgctcaacggcgatgcccatgtcggtcgtctcggtaacgaaaaagataattacgctgagctgagctttggcaaaaagctcaccttcaacgatggctcatgggcgcgcttcaagaccatgctcgccgacggggccaccaacccggatccgtgggttcaggataacgacagccaccatctgaacattcgtcagctgtacgtcgagatgggtaactttgccgaattcaccggtccgttaaaacgcgcctcaatttgggccggcaagcgcttcgatcgggataacttcgatatccactttaccgatagcgacatcatgttcctcggcggtaccggcggcgggatcaatgatgtcgactggggaagcggcctgcgcggcgactattcggtgtatgcacgtaacttcggcgaccttggcagcgataattacgcggataatgacatccagaatctgctgttcaccgccaaccatttttacggcaactggcaactgatgaccacggtgatgaccgcccagggcaacgatgacctgaaagataatacctcgaccaccgggagctatgccctgcgcagcgataacaccgccaaaaacggctactacgcgatgctggccctccacgacaaacagcagttctacggcctggcgccgggggtgtctgaaagcgccctgcaatacggcgtcgggctgggcgccgaagcgcgtcagccggggagcgatggcgatctgaccgagaacgcggcctccctgcgctttgcgtcgtatggcatcctgccgttggggaaaaactggcagctggcgccgtcggtgatagcccagcatagcgaagaccgctatcgcgacggcgaccgctacgactgggcgacgtttaacctgcgggtatcacaggggatctccgctcacttcgccctgctgtatgaggcctcgtggcagtatatggatctcaatccgaacgggcgcagctatcgctataatgacaacgtttatcagtatcaggcggtgcgcggtgatttctacaagctgaccttcgcccccacctttaaagtgggcgatgtgctggatatcaaggcgcggccggaaatccgcttctttgccacctggatgaactgggataaagcgctggatcgctacgcgataaatgacgatttcggcagcaaaggctttaccgctggcgggacatggaacttcggcgtgcagacggagatttggttttaatcaaacggcccgtccggctcaaatgccaggacgggttgatttaaatacacgctgttactttgtcactatgccagtgctgtatgaagtaatataaactcataaaataaaaaccataacaggctaaaaagataaaggttgtttttataattccaacaagtgactttcgttttttctcaataatgagaagatcgtgaaacctttcttgctgttgttctggtgttaaattatcaactattttattttttatatcatcgtgaatctttttaaacgttcgcttttcacctggaaagctaccgtttagaagaaacaaaaaaaataaagaaaagcataacgaatgctaatatccgaatactgggctcagttaccccccagcatccaagggtagcaataaacaaccagataccatgagtgtttgctcgtgctctaaacctatcaatatgagcgctgtatttcttgatttgtttcaaaatagaatcgttggtttccatacgtaatgcactcctttttaaaggccccggttacgaaagagggcaaactctgccatttttcttgcgaagaataatctttcaaacaaccttcaacaagttgataatcaatggattaccctgaagcaataaaagcagttttctggctgcaccggttgggtgacgtcgtttcgtttcccagcttttaaccaactcgtagctaacgccaacggccgctgcaaagtcctgctgttttaaacctgtggcttcacgtatcgctttcacgtcaatttcgctgaaggtatgaacgtgctgctccatcggcatttgttcacctttctcgatcctgaccatttcttctgcactcgccagcagatcggcaaacaattcgtctttcatacccacctcggttggctctctggcgcttaggatagatgaacatgctgtttctctcagtgcgtcgccggagaagcccctccccgggggcggcgcaaagcgccttgcccgggctacggaactgcagaccgctgagagcgcgtagcccggacaaatgcgcagcatcgcctccgagggtcgggttacatgctataacccggctgcttaatcaactgcgccatctgcggggcgatctcactgtcccacaccgcctgccacgcgtccggctcaacctgagtgagtgcgacgctgacggcgctctctttgctgttcagatggcggatcagcacctcagtgatgtcggcggccagcgcggttttttgttcatcagtcagttcacggggaaaacatttaatatcaacatgcggcatagcaaagactccttgtgatgagagccataacgctaccacagaatggccgttctggttggcatcgcgtgcgttaaatcagcttgttacggcgtagcgccgcggccagctccggtcgctgacagaccgcccgggcgatggcggcgaattttggcgcgtggtcgtcaaaccacgcctggcggggtccccagcggtacatcgccgcgatatagcaatccagcaacgttaccgacgcgcccagcgcccaaggcccggcggccagctgctgttcgaaccagagatagagatttttccggtactggcgacaattctccaccagctgctccgcggcggcgggcgcccagcgttccgggtaatcggcataggtaaaggtaggatagacattggccaccagccagaccagcaggcgctgaaactgcggacgctgtggcgtccccggcgcgggggccagatcgggacgctggtcgaggatcatcagcgcgatggcggcggtttcggtcatgatgctcccgtcggccagcctcagggtgggcacctggcacagcggattaatctgccgcagacgctcgcgcgccggaccgggctggtcaaagccctccacgtcaaccacctcgtagggaatatcggccagggagagcatcagctcgctaatcgtcgagccccatcccggcacgccataaacggttatcatggtcggcctccagggtaaagcctaagtgtaggcagaaatttgccgctcacccacccggcacaccatgccactgggggttagtaggttatccccggcgggttgaccaccgactgcgccaccgcttcgccctgctccccccaacgcgccagcacctgctgatattcaccgcgggtaatcgccccgtcgagggctgcctgcagggcatagaccagaccgttgccttttttggtggttgtcgccacccacgcttttttcggccccaggcccaccacccgggtctggccgttaagcgccgctttataggctgccaccgactgcgggccgaaaaagatatccgcccgtccggactggatatagagattgccggaggcatcatcggtcaggtagaccggctgggcctgcggccgtccggcggcgcggttgtcctcgttccagcccagcaggatccgctcctgattggtgccggacccgacgatcactttgcgccccgcgagatcggcgggtccgtttaccgcgacgatatcgctggtggatttcaccgagaaggccagggagtccacccggtaagtcgcaaaatcgaacttctctttgcgcttctcggtcaccgcgatattgatcagcgccacatcgtagcggccggaggcgatgcccagcggccagtcctcccacgcggtgggcaccagcctgagcttcaggccaaggcttccggccagcaggcgggctatatccgggtcgctaccgatccgcgtgcggttgtcgctggccagcagggccagcggcggcgaattgagcgccgagatcgccaccgttagcgtccccggctcgacgaagcgatagcccggcggaattttcgctatcgcctgcgggtcgcgggtgaccggcaatggctgctcattggcgcgcagatccagcgccgcgtgagcgctcatggcaaaagcgctgagaacaagggtcattagcgctctgttcatgacggcagcaccctggataaaaactgccgggtacgcggatgctgcggatggttgagcacctcgtcgctgctgccctgctcgacgatcctgccgtcgaccataaacaccacctggtcggccacctcgcgggcaaagccaatctcatgggtgaccaccaccagggtggtgcccgatcgcgccagcttcttgatgacatccagtacctcgcccaccagctcgggatccagcgccgaggtgggttcatcaaacaggatcacccgcgggttcagcgccagcgcccgggcaatggcgatacgctgctgctggccgccggagagatgccgcgaccaggcgtcggctttattgcgcagtccgacgacgtccagcagttcataggcgcgggcaatggcctctttgcgcgtgacctgctggtgggcgatcggcgcctctatcaggttctccagcaccgtcaggtgcggaaacagattaaagttctggaaaacgtagccgacgttgatccgctggcggaggatctccttctctttcatctcatacagcttgtcgcctttgcggcgatagccgatatagtcgccgtcaatctgaataaatccctcatcgacccgttcgaggtgatttatggtgcgcagcagcgtggacttgcccgagccggaagggccgaggatcaccgtcaccgtgcccggggggatctccagcgacacatcgtccagcgccttgtggcggccatagtatttgctgaccccggtgatagagatatggccattatgagagctgggcatgaacggcctcctgcggctgcgcttgacgtgcgggttgattcagacggctgctgcgggcgctgtttaccgccgagcggcgctcgctgcgcgccaggccccgttccaccagatactgaatggcggagaggacgctggtgatcgccagataccaggcggcgccgaccatcaacagcgggatcacctcctgggtacggttgtagatcatctggatggtgtagaacagctccggcatcgccaggacatacaccatcgccgttcccttggccagactgatgatctcgttgaagccggatggcaggatggtgcgcagcgcctgcggcagaataatgcgcagcgtgcgccgccaggcgggtagccccagcgcggcggcggcttcatactgcccgtggtcgacgccgagaaagccgccgcgaataatctccgcggtataggcgctctgcaccagggtcaggcccaccaccgccgtggagaattgccccagcacgttaatggtctgatagctggcccaggtcacgccggtaaacgggatccccagcgacagggtgtcgtagagataggaaaagttatagagaatgatcagcaccacaatcagcggcagcgagcgaaacagccagatatagccccaggcgagactgctgagcagccacgatgaggacaaacgggccagcgccagcaggccgccgaagatcacgcttagcaccgtgccgagcagggtcaggagcagggtttgccccagcccctcgaggatcaccgggtcgaagaaccagcgggcgaagacgccccactcccagcgcgggttaaaggccaccgactggatcaccaccgccagcaccagcagggcgaccagagccccgaccacccgcagcggatagcgcgccggcaccactttgatcgtttcagatgaatgcataatgcctcctcaggcgctgtggctgtaggcgctcaccgccagcgctttagtgaaccgcagccggccatcgtacggcggctgactgtactcttccgggtctcgcgtgaggtcaaactgcgcctcatacccctggctgagatagagctttaccgcctccggctgacggaaaccggtggtcaggtagatatggctgtacccggccagcaccgcccgtcgctccagctcctggaccaccttcgccgccagcccctgctgtcgcagacggcggtgtgtccagatacgtttgatctctgcggtgtggcgatccttcggcttatacgcgccggtggcgataatttcaccctcacgctcaaggacaataaacagcccctgcggcggcaaataccactcacttaactccacttccgcatcgcgggaaaaatagtcgccgtagcgggcggcatattctgcaaacagcccgctaataatcggctgcagctccggagcctccggagaaatatcgcggaatgcttcgctcatcgcgcctcctgtcagtcgcccagtccgggcggattgatttccgattgcggaatgctttccaccccttcgccccagcggttaagcactttggcgtagtccccgctggcgatagccccgttcagcgccgcctggacggcattcaccagcccgctgtcttttttcagcgttaccgcgatatgcgccgctttcggccagccgccatcgacgctgcccaccagtttggttttgccggtcagcgccgccttccacgcgccaatcacgttggggccgaagaaggcgtcggctcgtccagtctgcagggccagcgtctgggcggcatcatccttggtgtagaccgggataaacggcttcagccccttcttgacgttctccgcgttccacgccagcaggatcgcctcctggttggtgccggagccgacaataatctttagcccggcgatatcttccgctttgtcaatcttgctcagcgggctggtgcttttgacgtagaagcccagcgagtctttgcggtaggtggcgaaatcgaacttctctttccgctctttggtgacggtaatattgctgatcgcggcatcatatttgccggaggtgacccccagcggccagtcttcccatgaagtgggaaccacgtttacttccagcccgaggctctccgccaccagccgggcgatatccgcctcgctgccgagcagggttttgttgtcatcggcaaagaccgtcagcggcggagagttcagggccgccaccgcgacggtgaatttccccggcaccgccagatgcagatcttgcggcaacagggcaatggcctgcggatttttcgctgtgtgaatcggcgttttgttggcctccaggctcactccggtgccattgatcttgacgtcctgaccccacgatgaggcgctaaatgccaacgcgacggccagcaagagtgttgttttctgcatagcgtgattctcttttattatttttggaattgattagcgggtagcgccagacccagactttcccgcagggtggtgcccggatagtcgcgacggaacagtccgcgcgcctgtaacagcggaaccacctcatccacaaagcgcgggaaggtttccggcgtgccgccctgaataatgaagccgtccgccgcgtgctgctcgaaccacagttgcaggccatcagcgacatcgctggcggtgccggtaaagcgcggacgcgggctggctgcctccagagccacctggcgcagggttaagccccgctcgcgggcgtgacgtttaatctcgtcggtggtactgcggaagctgttttgtccgaggtcgccaatatccgggaacggttcatcaagcgggtactgcgaaaagtcatggtgttcgaaatagcgcccgagataattcagcgcatcctcgatggagaccaacgccgcggtggtctggtactgccgctccgcgtcctcggcgtcatccccgacgatgacgctgacgccctggaaaatatgcagttggtccggactgcgctgatatgcggcgagttggcttttgacatcccgataaaatgcctgcgcctcggccagcgagtcctgatgggtaaaaatggcatcggcgtggcgtgcggctaattttttgccgtcatccgacgcgccggcctggaaaataatcggtcggccctgcggcgtgcgggcaatattcagcggcccggcgactttaaagaaatcgccgtggtggtcgagcgtatgcagtttatttttatcaaagaactgaccagtctccttattgcgcacaaaggcatcttcttcccatgaatcccataagcctttcaccacctgcaggtattcatcggcaatgcgatagcgcagcgcatgatccggatgttgggcccgggagaagtttttcgccgacccctccagcggggaagtgaccacgttccaccccgcccgtccctggcttaaatggtcaaggctggcgaactggcgggcggtggtaaacggctcgctgtacgaagtcgataaggtccccaccagccccagtcgccgggtgatcgcggccagcgcggaaagtaccgttaagggttcgaagcgatttaaaaaatggggaatcgatttttcgttaatatataaaccgtcggcgacaaaaataaaatccagcttccccgcttctgcttttagcgccgtctgggtgacgaaatcaaaattaatactggcgtccgcctgggccgccggatgacgccaggcggacatatttcccgatgcgccatgcaatatggttcccagacgcaattgtcgattttcagacatagctaccccttcccctgtcattcgttaaatgtgttgtaacgcttcttccgcgagacgggcgaaatagtgcgccgcgggcgcaatcagccgttcatccggattaaatgccggatggtgcaaaccatattcgctggcgctgccgatgctgacgaacgccccgggaatatgctgaagatagaccgcaaaatcttcgccaccgagatgcagatcggcatggtgggtgcgatacccggcctgggctgccacctcgctggcgaaatcggcccagcgggcgtcgttgaccagcgccgtcgggccggcgtaccagaagacgtcaatctgcgcgccaaaggcgctggcgaaaccggcggcaatctcgctgacccgggccttgacccgctgctgcacttcactgctgtgggtgcgcagcgtcccctccagctcgacgctctccggcagcacgttccaggtattgcctccctggatccgcgtcacgctgagcaccaccgagtcgagggtgttcacttcccggctggccacgctctgcagcaccgtcaccagctggctggccagcaggatcgcatcctttccttcatgtgggcgggcggcatgcgcccccttcccggtcactttcaagacgaagcggtcgacgttggcgtagaacgcgccgccgcgggtggcaaattcgcccaccggcaggccgggctcattgtgcatgccgaagatcgccgacacctcctccagcgccccggcgcggatcagggttttcgcgccgccaaaattttcctccgccggctgaaacaggatccgcacccgccccgggagttccgcttcccgctccttcagcagcagcgccgcccccagcatcacgctggtgtgaatatcgtggccgcaggcatgcattaccccttgattctgcgagcggtaaggcagaccggtcgcctcctcgatgggcaacgcgtcgatgtccgcccgcagggcaatcaccttgtcgccgctgccgacttcggcgaccagcccggttttcagatcgtagggcagcagggtcagcccgccgctctgcagccagtcgcggatccgcgcggtggtggccacctcctgcagtgagagctccgggttctggtgcagctcgcgccgccagctaatcagttgttgttcaaaggacattcagcacctccttgccgtagtgagcctgcgccagcaggcgcagggagtgcaggcgcgctggcccgtcgctaatgggggtatcaatgatgagttcatccaactgttcttccgcctgcagcgcgtcaagccgggctttaacctgttcgggagtaccggagatcagcgaagattcacggcgggcaatgcgcgtcggtcggctgccggcctggcgggcaaaagcgacggcctgcgcctcactgccgacggtcacccgctggccgttctccagctcgacgccccacacctcgacctgctgcgccagcgcggcggcggtggccggatcgtcagcgaccaccacctggacggcgaccatcgcctcacgcgggctgagctcgcgccagcggttgaacacggcacggcgcagcgcgctgtcgccattgagatgggcggcaaagacaaagttccagtcaaggcgggcggccagttcagcactctccaggctggcgccgagcagaaaaccatctgcccggcgcggcgggatcggcgtggcgcgtaggctctcctctcccccgggctcagtcagcgacagccagttatccagctgcgccagctgatcggcaaaggtccctttctcctcttgatgcaggccctgctgcagggcgcgggtggagagcggcaggccgccaggcgccttgccgaccccgagatcgatgcggcccggcgcgagggcggccagcaggttaaagttttccgcgaccttataggggctatagtgctggagcatgacgccgccggacccaagacggatccgccgggtgtggcccagcagccaggcgataaccagctccggcgaggggctcgccagctgatcggtattgtggtgttcggcgacccagaagcggtggtagccccaggcttcggcgtgttgcgccagcgttaatgtacgcgccagcgcctgcgcggcggtttccccggcggcaagcggacttttatccagaatactgattcgataagacatttcgcaggctcatatgaaagtacgtgcctgcattattaaaatctctgctaactattgagaaacaattaattcacatgtgtactgctgaaaattagatatgcccggctgaacgctgcgcttccagctcgcggagcagcgcctcggcctgccgcggattgcgcacccggacgaagcgaatatgacgatattgcggatcctgcatatcggccagatagcgtcggcgatgctgccgccaggttttcagcgtccagaggatgatggattcccggctgcagaacgaacggcgaaaactctcgcagttgcccgtgcccggccacagctcctgatgtcgccacgcccggctcgccgcccgccataccgcctggcgcagcgtgcgccagaaaccataatctacccagatcaccaaatccaccgcacgccatttaacgctgcggctgcgattgtaattgccatccagcacccagcccggcgtggccgtcgcggcggcaatggcggcgaaaaatgcctcatccggcgcgccctgccagttcggccgccagtacaggcgatcgagctcgatccagggtaattccagcctgtgcgccaggcgccgggccaaagtggatttgcctgagccgctggtgccgaccacgttgatattcatctctgtttctccccggttaccagactctgcctggcgatactcttgaatcatctttcgggctgccgtccccccggtcatgccgcgccagcgaatgtcggttcacttggcgctggcgttttttgggccgactacaatacctgccctgcacagaggaataaatcatccgccataaccattctgctccactgcgtccggccatcaggctggcacaatcctcaggccgggcatacactctgcgtacctgtgagcagtattcatcaatccggaaagattatgctaaaagagaacgtaaacgatctgctctcctttatggtggtggcgcgtgaacgcagctttacccgcgcggcggcccagcttggcgtgtcgcagtcggcgctcagccatgccatgcgccatctcgaaacgcggctcgatgtccggctgttaacccgcaccacccgcagcgtggtgccgaccgaagcgggcgagcgactgattcagcgcctcggtccgcatctggaagagatcgagcaggccctggctgcattgcgcgacacccgagaacgcccggcgggcaacctgcgcattaccgccggggagcatgccgccagcgcagtactctggccggcgctaaagccatttatgctgcaatatcctgatattaacatcgaaatcactgttgataatgggctcacggatatcgtgggtgaccgcttcgacgccggggtgcgtctcggcgaacaagtggcaaaagacatgattgccgtgcgcatcgccccggatatgcggatggcggtggtgggttcgccggcctatctgcagcgggccggtacgccgcaaacgccctgggatcttgcccaacatcgctgcatcaatctgcgcctgccgacacgagggggactttacgcctgggaatttgcccgcgatggccgggagattcaggtgcgggtggagggacagctgctcctcaacagcctgccgcagcgcatcgacgcggcggaggcgggcctcgggctggcctacgtgccggatgactgcgtggcggaggccttagccagcggccggctggtgcgggtgctggcggagtggacccccgccttccccggctaccatctctattaccccagccggcgccagcataccagcgctttcacgctgttactggaaactctgcgacgctgatctcattgataaatctgtcaaatgctctcggtaaatgttttaggtgcgtaactattaggttacgtgtaggattcagcgccatgtctgagcttatctcctacgtcagaatgatgagaaagccagcataatgtgccagccgtcctccattccggctgcaaacatgggcattgacaggaaactgatacatcaatgaatacgaaacacgaaaatgcagcggagcatcatgctgcaaaacgccactggcttaactcacatgaagcgggttatcacaaagcgatgggcaaccgtcaggtacagatgatcgccatcggcggcgccatcggtaccggtttgttcctcggcgccggggcacgtttacaaatggcagggccagcgctcgccctggtctatctggtctgcggcatcttctccttctttattcttcgcgccctcggcgaactggtcctccaccgcccctcgagcggcagcttcgtctcttatgccagggagttcctcggtgaaaaagccgcttacgtggccggctggatgtacttcgttaactgggcgatgaccgggattgtcgatatcaccgccgtggcgctgtatatgcactactggggcgcgtttggcgatgtgccgcagtgggtcttcgccctcggcgcgctggctatcgtcggcaccatgaatatgatcggcgtgaagtggttcgccgaaatggagttctggttcgcgctggtaaaggtgctggcgatcgtcgcctttctcgtggtcggcaccattttcctcggctccggtaagccgctggacggcaatgccaccggcttccatctgatcaccgataacggcggcttcttcccgcacggcctcctgccggcgctggtgctggtgcagggggtggtcttcgccttcgcctccatcgagctggtggggaccgcggccggagagtgtaaggatccggagacaatggtgccgaaggccatcaacagcgtgatctggcgtatcggtctgttctatgtcggttcggtagtgttgctggtgctgcttctgccgtggaacgcctaccaggccggacagagcccgttcgttaccttcttctcaaagctgggcgtgccatatatcggcagcgtgatgaacatcgtggtgttaaccgcggccctctccagccttaactcgggtctctacagtaccgggcgtattctgcgctcgatgtcgatgggaggctccgcgccgaagtttatgtcgaagatgagccgtcaccacgtcccttacgccgggatcctggcgacgctgggggtatatgtagtcggggttttcctcaactatctggtgccatctcaggtatttgagatcgtactcaacgtcgcctcgctggggatcattgcctcctggggctttatcgtggtgtgtcagatgcgtctgcgcaaagcgatcaaggaagggaaagcggcaaaggtcagcttcagaatgccgggggcgccgttcacctcctggctgacgctgctgttcctgttcagcgtgctggtgctgatggccttcgattatccgaacggtacctacaccataggatcaattccgctgctggcggtattgctggtggctggctggtttggtgtgcgtaaacgcgtgcatgagattcacagcacggcgccgacgctgaggaagtaactggcaggactcccggtttgtccatcgcgggcaaaccgggaggtcagaacttaattatcttcaaccagctgcgacacatcgctgctgttaatttcccgcttattacctgactcatcgatatagctggtcatccccgtttctttatccagctgcggcttgccgtgggtaacgatagtttgaccgctcttcgtggtcataacgtagtttgacgaacaacctgccagcagcgccagcatcgcgccggcgcaaatcaccatgaatggctttttcattttatctccactgattaccactgcccgcacgtggcgggaaagggttaagtgtataaccatctggtttgtcaggccaataggcgtttgtaacagagggtgagtcgccgggcctggcccggcggcatgcggagcgcgaccaccgttttccggtttcgtcgcgctgaggtcttagagggcgatgcggatcacatcgtccggcgcggtggcttctttctcacggctggaagcctgtttcacgctaacgtacagcgttttgccgtcctcggagagcgccaggctgttggggtgagtcggcgttttaaaggtcttcaccaccttgtagctcttgccgtcgataacgctgacttccccggccttacgatgcgtcacataggcttcgttgcgcgccgggttaaacagcaccgccagcgactccggcgcggcgattttctccagcaccttgccgtcgcgggtatcgaccaccagcacttccggctgcttgctgtcggtaataaaggcacgatggccggcggtatcgagactcaggttaagatagaaatgcgctttgccgtcatcctgcaattttttgcgcgacgcaatcgtgttgctctcgctgtcgatggtcagcagttcgccatcggcgttggtggtatacagacgcttagcctgcggatcgatcgccagacccgtcgccattgccccggtgccggtaatggtcgttttcagcttcagggtcgcgccatctaccacccaaatcacgctctctttgcccagaccggtaatgtagaccgtgttggtctgctcattgaccgccagctcgcgcggctgcagcgggcgcacggtttcgctgcgctgacgctcgtccagcaccaggcgccccttcacggcgccggttttggcgtcaatagcggtgacagtgctgtcgacggtattgccaaaccacagcgtgccggtggcatggttgatagtggcgccgaacggcttcagatcgttgtgaataatctgcgtcacgtcgagggtggtggggtcaagacggtaaaccaccccgcctttgtccagcgaacgactctgtgatgtggcgacccacagcgcattctcctgctggctgtaggccatttcgtaggccccttttccgacggccttgcgcagcatctcttccgcggcgtgggcgctaaagctgcctgccagcagcagagaagtgacgagcagtgaatggcgcagacgcggcgcggcaaaatgacgtaatgacatgacgactccctttgataaaccagtatgtgctgacccgacatcgcttccggcggtaaagtcctggctttacccttatttttgaatgcgaatagtaatcattatttatatcaaagtggagcgttaattgttgttgtgcggtaaattcatgtctggcgagcactatccgttaaccagtagcagttaataattttcaaatattttacaaacgaggtaacatatatacatatgttccatttggttcgttttgagtattatcgatgaaaatcctgtccgtgcgtctcgccgccctcccggccctgctcttgccgctcattgccgcagcccaggccgctgatgaacaaaccatggtggtgaccgccgcgccaaccacggtttctgaactggatacccccgccgccgtcagcgtggtgaatggggatgagatgcgccaggccgcgccgcgcgtcaatctctctgaatcgctgggcgccgtgccgggcctgcaggtgcagaaccggcaaaactatgcccaggatctgcagctgtcgattcgcggctttggctcgcgctcaacctatggcgtgcgcggactgcgcatctatgtggatggcattccggccaccatgcccgacggccaggggcagacctcaaatattgatatcggcagcgttgacaccattgaggtgctgcgcggccccttctctgccctgtacggtaactcgtccggcggggtgatcaacgtcaccagccagaccggcgcccagccgcccaccgtggaagccagcagctactatggcagcttcggcacctggcactacgggatgaaagccactggcgccgttggcgacggcagccacgcaggcgatgtggattacacggtctcaaccaatcgcttcaccacccatggctatcgcgatcacagcggcgcgcgcaaaaatctggcgaacgcccggctgggggtgcgtatcaacgacgtcagtaagctgactctgctgctgaatagcgtggatatcaaagccaatgacgccggtggcctgaccgccgatgaatggcgcgataacccgcgccagtcaccgcgcggcgaccagtataatacccgcaagaatacccgacagacccaggccggcctgcgctatgagcgccagctcagtgcccaggacgatctcagcgttatgatgtacgctggagaacgtgaaaccacgcagttccagtcgatcccccgcgcgccgcagctgaagccgagccatgccggcggggtgatcgaccttacccgtcactaccaggggatcgatacccggctgacccatcgcggagagctgctggtgcccgtcacgctcaccgccggtctcgactacgagaacatgagcgagcggcgcaaagggtatgaaaactttgtgatggtcaacggcgcgccgcagtatggcgaacagggcgcgctgcgccgtaacgaacgcaacctgatgtggaacgtcgacccctacctgcagacccagtggcagctcactgacaaactctcgctcgatgccggggttcgctacagctcggtatggttcgactcgaacgactactacatcaccccaggcaatggcgatgacagcggtgatgccagctatcacaaatggctgcccgcgggctcgctgaaatatgccctgaccgacgcgtggaacgtctatctttccgccggccgcggcttcgagacgccaaccattaacgaactctcctaccgctccgataaccagagcggcctcaacttcggcctgaaaccctccaccaacgacacggtggagatcggcagcaagacgcggatcggcaatgggctgttcaccgccgccctgttccagaccaataccgataatgagattgtggtcgacagcagcagcggcgggcgcaccagttataaaaacgccggcaagacccgccgtcaggggatggagctggggctggatcagcagtttggcgagagctggcgtctgaaggcggcctggacctggctggacgcgacctatcgcactaacgtctgcgacgacgccagctgcaatggcaatcgcattccggggatcgcgcgcaatatgggctacgcctcctttggctatcagccggagcaaggttggtacgccgggagcgatattcgctatatgagcgatatcatggccaatgacgaaaacaccgccaaagcgccctcctggacggtggttggcctgacgactggctataaatggagctacggcaggatggatatggatctgttcggtcgcatcgacaacctgttcgaccgggagtacgtcgggtctgtcatcgttaacgagtctaacggacgttactacgagcctgccccgggacgtaactacggcatcggcctgaacctcgcctggcgcttcgaataacgcgccccttccccgccgatgcctctcgcgatcggcgggcgaagcgcttttccttaccgtctattccaccgccaggcgtacacccgccaaccaaccgcgcttgacactccacccccttcgtagtcatatagtaaccacataatcaccatggttactatttatattgatcggcacttttatcagccagggagggataaatggataatgtcgtttatgcggactgcgtattgattaacggcaaggtcgccacggtggacgcacattttagttttaagcgcgccatcgccgtgaagcagggatggattattaacgttggtgaagaccaggagattcagcagcatattggtccccagacgcaggtcattgaccttggcggcaaactcattttacccgccgcgcatgactcacatatccatatcggctggctcgctgacagctggcattgcctgaactgccaggacgtgcgttccctggcagtactgcgggaaagactgcgcgaccaggcagcccgcactcccgccggggcatggattcgtgtctgcggtctggatccaaacgcaatcaaggagtgcgcggccgagcagcgctctctgacgcgctgggatattgacgacgtcacggccgatcatcccaccctgctcgccctgtgggacggtcactcctgcatcgtcaacagccgggcgcaggccctctccggtcttgacgccagcacccctgatcccctcggcggacatctggggcgaacggccagtggcgaactggacggcaattttatcgacctgcccgccctgcatctcgcatccggcacgatgccccgtctgaccgtagcggccctcaaagagaaccttatggcagcccagcgcctaatgaacagcgaagggtatgccagctacacggaaggcgccatgggtccgggggaaaacacgcgcgaggtgggcgccgcgggggatcgcgccatcgccgcctaccgtgaactgcaggatgaaggaaaactcaccgcccgggtatccatcgccttttactccgccgagcggggcgttcagtcctgcgccaccctgaagcgcgatctggatagctttgatttctcccagttcaccgaccgggactggctggactgtcggaccataaaactgttctgcgatggcgttcccacatcgcacacagcgtggatgaatcaggattacgccgaccggccgggatatcgcggacgctcggtgtttggtggccccgaggcgaccgaggaagcacaagttgaggcgctacagcagatgattctgctggctcaccagcgcggttttcaggtggcagtccatgcggtcggcgataaggcggtaaaagtcacgattaacagcttcgtgcaggcgattcagcgctatccgggggagagccgacggcattatgtgctgcacggctcaatgggcgatcggcaagatttcgtgatggcggcaaaatacggcattctgctttccgaacaaccctcacccggcggcccggcatatgactatgaacagcgcgcccgctactgtggcatcaagggggaaatctgcaaagggctacgggatatcatcgaccttggggtcatcgtcgccggcgggtcagatggcattatggcgctggtgaactggcgcaaaatggttcaggcagcggtcacccgcaaatcatcttccagcggcaacgttattcgcccggaactggcaattagcgtggcggacggcgtgcggatgtacaccatcaatgccgcctatcaggaagggaaagaagcggtacgcggatcgatagaggtcggcaaagtcgctgattttcaggtgctggaccgcgatatcttcgccgtagcccatgaggagattggcgccagccgcgtggtgatgaccatggttggcggaaacgtcgtctttcaagactaaccgcgctcacccggctcaggtcgccgggcgggcagcgtgctgcatcagcggaaggcgtctgcccgccagagcatcgcgcttccgctacaggagcgaattaaagcagatttcgcagggataactcgaaaatgatcttttccgcctggcaggagaaggcgatggagaggtcgagtttcaccgcgtcgccagcggcgacgatggtgtaatcgacctgcggcggttcactggccggcgctgcggcggcagcacgttcgcgcacggcggctacggtggattccgcttcttcgcggtttgggaacaccttctcggcccggtagacgcagtcctcgttatcaatgatcgtcccgacatcaatggcgcagcctttggtgctgcatttatctactacatctttcatcgtaataacctcttgagttttcttaaggataagaacccgcccaccgaaaagcaaaccattaatatccgtaaggattagcaatttttctattatatcgcgtcgcgccgggcgccatcttgcgccaccgcaaaacgtggcaccatgtttacggacggtcgcgtaacgatacgcgttgcctcgcagcaatcgtggtctccatcacactattctgcacaccatctcgtctgccccgactcgcagcgttagtctggtcacagaacatcgccaacaaggagctgctatggcactgccgattatgattgattgcgatccgggacatgatgacgcgatcgccctggtcctcgccctcgcctcgccggagctggaggtgaaagccgtcaccgcttccgcgggcaaccagaccccggagaagaccctgcgcaacgtgctgcgtatgttgacgctgctgaaccggccggacattccggttgccggcggcgcgtggaagccgttgatgcgcgatctgatcatcgccgataacgtgcacggcgagagcggactggatggcccgagcctgcctgagccggcctttgcgccgcagaactgcaccgccgtcgagctgatggctagcgtgctgcgggaaagccaggagtcggtgaccctggtggccaccgggccgcagactaacgtggcgttgctgctcgccagccatccggagctgcacgcgaagatcgcccgcatcgtgatcatggggggcgccatggggctgggcaactggcagccggcggcggagtttaatatctacgttgatccgcaggccgcggaaatggtctttcagtcggggatcccggtggtcatggcggggctggatgttacgcatcgggcgcaaatccttcccgccgatatcgagcgattccgccagattggcaacccggtgtcgaccatcgtcgccgaactgctcgacttctttatggcctaccacaaagatgaaaagtggggcttcgacggcgcgccgctgcacgatccctgcaccatcgcctggctcctcaagccggagatctttaccacgatcgaacgctgggttggcgtagaaacggaaggcaaatatacccaggggatgacggtggtcgattactaccatctgaccggcaatcggcccaataccaccctgatgctggatgtggaccgcgaagcctttgtcgatctgctcgcccagcggttagccttctacgcctgacctctatgccaggcccctttaccctggcggaaaaaggggcctgttcagtcgaagcccgccaggctagtcgtccgccgcgacgcggatcactaccttaccgaagttctcgccttttaacagaccgatcagcgcctgcggtgcctggtccagaccgtcgatcagctgttcgcgatatttaattttcccctcctgcacccagcgccccatctgctgctggaattcggcgatccgatgcccgtaatcctggccgataataaagccctgcatccggatgcgctttttgaggatggtcgccatcagcagcggcagacgatctggcccgtccggcagcccggtggcgttatagccgctcaccagcccgcagacgggtacccgcgctgcggtattcaacagcggcagcaccgcgtcaaaaaccttgccgccgacgttttcataataaacgtcaataccctgcgggcaggccttggccagctgttcggcaaaatcatccgcacgatggtcaaggcagagatcaaagcctaacgtctcaaccgcatagcggcatttttccgcgccgccagcgatgccgacggtgcggcagcccttaattttgccgatctgtccaaccgtggcgccaaccggcccggtcgccgcggcgaccaccagcgtttcgcccgcctttggctggccgatttccagcaaacccatgtaggcggtgaagccgggcatccccagaactcccagcgaccaggacgggtgttgcggattgtcacccagcttcaccagtccgctgccgtcggagagttcataatcctgccagccgctgtagcccagcacccagtcgccgggttgataatcggcatgatttgagctgaccacgcgactcacggtccctcccaccatcaccgcgccaatggccaccggcggcgaataggacggcgcgtcgctcatgcgcccgcgcatatacgggtcgagcgataaataaacggtacgcagcagcacttgacccgggcctggcgtcggcacttcgctctcttccaggcggaaattctctgccgtcggttcaccatggggacgggaagccagcacccagcggcgatggcgttgcggttgatctgtcatagcaaactcctcttgttagcagactgtactgaggctagctgctttatgcgtattatgctttaacattaagagccggatggcgattgattaaggcgaactaccagatagacgcaggtctctgcggattcattaataaagcgacaatcgttgggcgggccaagctccagacaatcccccgcctgcatctcatggcgggtattgccttcgacaaacaccagctcgccctgttgcagccagattagctggcgggcaagcgcataggacgcggcgggcatcggcacatcgctaccgggcggcagctcaatctgcaccagatcgatcggcaaatcgctgcgcggcgaaacgtggcggcggagatagtggctttgcgggtcgcgccataccggctggctggcaaagcgcagcagcttgccctcctgcatttccgcgcgggcgatcagggtcgacatactgatgccgaaggcgccggaaaggcggccaagcatcgaggcggtcgggctgctttcgccgcgctcgattttatggatcatcgcccgtgaggcgccggcccgttcggcgaggtcgttcagcgaccagccgcgggactcgcgctcgatgcggatgcgcgcgctgatgcgctgattgaggttgtcttctatagtattcataacgtaacactatagtgtgcgcccccccattacacaaccatccaccgagacgtgttattcccgggttagccgttaaaattatgctgaaaacggatgacagcgtggcgttcattattgtaataatattgtactactatagtgtacgaaaaattgaggtttgctatgtccattcgccctgccattaaagacgactgcgcggcgatcgccgagatctataaccatgccgtcgtccataccgccgccatctggaatgataaaactgtggataccgacaaccgcatcgcctggtttgaagcccgccagctggctggatttccggtactggtgagcgaggaagacggcgtcattaccggttattcctcgtttggcgactggcgggcgtttgacggctttcgccataccgtggagcattcggtgtacgttcatcccgaacatcaggggaaagggctgggccgcaagctgctggtcgccttgatcgccgaagcgcgacggctgaataaacatgtgatggtcgccggcatcgagtcgcagaatcacgcttcgctgcatctgcatgaaacgctgggctttatcaccaccgggcagatgccgcaggtgggcaccaaatttggccgctggctggatctgacctttatgcagctgcagctggatgcgcgtcaggacccggacggcaaagcatgaacgcgtcgctcactctcgcctgcctgatcgccgccggcgttggcctggtagtgcagaacactctgatggtgcgcatcacccagtcggcgtcgacgatccttatcgctatgctgctcaattcgctggtcgggatcgttatcttcgtgacgatgttactgctgcgccagggcgtcgccggctttcaggagctggccctgagcgtgaagtggtggacgctgatccccggcctgctggggtcctttttcgtcttcgccagcatcagcggttatcaaaacgttggcgcggcgacgaccattgcggtactggtggccagccagctggtgggcgggttgatcatggatttagttcgcgcccacggcgtgccggtgcgggcgctgatcggaccgttatgcggggcggtgatgctggtggtgggcgcctggctggtggccagacgccagttctgagcgcatcttcagaggatcgcgccgcctttggtcaactgctcgcggcgcgcgtcctgctcttcctgatgctgtcgcccatgatgggcgatggcggtgcgcagacgctgctgttggatatagcgttcctcacgactgagttgcgcatcatcactcagggcgattagcagctcattcatatgcgcgataacgccctcggccagggcgtcatcgactttgacgataacctcatccagatgtgccatcctgttctcctttcgcttaattcagcttcgctttggaaaaatcgctccccatcatgctgacggtgtagccgctgacgttgctgcgcgtcgcatagaaggttttcccggtcgccagggtgatccatggcgcctgctgataaaagatctcctgcgcctgttcgtagagtttggcccgcgcctgcggatcgctcaccaacagcgctttctttaccagcgcgtcataggatttgtcacaccagcgggcggcgttggagccggtctggatattatcacagctgagcaatgtgccagcaaagttgtccggatcgccgttgtccgacatccagccatacagggcgctgtcgtgctcccctttacgcataccggcaaggtattcgccccattcatagctgacaattttggctttcacccccactttcgcccagtcgttttggatcatttcggcaatgcgttttgagtttgggttgtaggggcgctggaccggcattgaccacagggtcacttccgcgccttgctccagacccgcctgcttgagcagcgctttggctttctgcggatcgtagtcatagtccgggagatctttcttatacccgagcatcgtcgacgggatcggtgatttcgccacgctgccggaatcgaggaataccgccttgacgatcgcctgcttgtcggtagcgtagtttaacgcctggcgcaccagcacattatcaaacggttttttctcggtgttaaacgccagatagccgacgttcagcgcctcaaccgcatgcagcgccagatctttattgcccttaatcaccgggaactgtaccggcgacggcgcgggaataatctggcactcgttggtctgcagtttcgccagacgggtctcgacgttcggcgtaatggagaagattaagtgcttggtcggtacctcgccttcccagtagtggggattggcaatatagcggatttgcgagtccactttatactgctgcagcgcatacggcccggtaccgacaggccagttatcaacgttttccggcgttcctttcttcagcatcgcctcaccatactctgccgacagaatagaggcgaagtccatgccccagtcggcaagaaacgctgcgttcggctcgttgagctcgaactggacatggtaatcatccacctttttcaccgatttaatcagcttatcgaggcccacgtcgtggaagtattcatagttcccctgcgacaccttgtgataaggatgctgaggatccatctggcgcagcacggagaacaggacgtcgtcggcgttaaaatcgcgggtcggtttgaagaatttgttgctgttgaacttcaccccctgacgcagagtaaaggtccaggttttgccatcctcagagacgtgccactcggtggccagcgacgggatcggcgtatttttcaccgggtcaaagctcaccagacggttatacagtacctgcgagctggcgacgaacgacggaccggagctggcgatctgcggattgaaggactccggagaggcttctgagcagtagaccagagtgtcattgcctgcggcccaggcggcgccggccggcagcagtgcgctcagcagcagcgccagcgtggttttccctgtagacatggttataagtcctgattattgattataagaacagtaataacagcacagccgcctgacggcggcaaataatcaatggctatcaccttatgcaaaacgcgtggaatttgctggtttaatcgacgttgcgctgctttttacgccagagggcttcgggatgatgtgagccacacaaaattcctgcaaaaaaatgtgcgataaccgcccggctcacgcttcccgtcagtgccgcccggtacactgggggaaccgcagaacaagaggtttccaccatgacaatcacctgcaatctgtacattaacggccagtggcacgatgccgaaggccgccgcacctttacccgacgccacccggcccacgatgaggcagcctcggtggccgctgccgccagcctcgccgacggcaaacgctgcgtcgaagccgcggcctgcgcctttccgctgtggcgcgatactgcgccggcggaacgacgtcgcttactgctcgaggcggcggaacagatgctgttgcgggaggcgaaatttatcgccgccatggcggcggagaccggcgcgaccgcgcactgggccggatttaacgttcatctggcggcagatattctgcgtgaagcggcggcgctgaccacccagattgaagggcaaataattccgtccaacgtgccgggtaacctggcgatgggcgtccgccagggggcgggagtggtgctgggcatggcgccgtggaacgcgccgctgattctggccacccgggccctggcgacgccgctggcctgtggcaacacggtgatccttaaaggcgccgaactttcccccgccactcagggactgattatcgacgcccttgacgcggcgggcttcccgccgggcgtggtgaactatcttacctgtgcgcctgaagatgcgccggcgctggtggaatcgctgatcgcccacccggcggtgcggcgcgttaactttaccggctccacaccggtgggacgcattatcgcccgcacctgcggacagtatctgaaaccagcggtgctcgagctcggtggaaaagcgcccctgctggtgctggacgatgctgatattgagcaagcggcggcgggcgctgtttttggcgccttcgccaacgccgggcagatctgcatgtccaccgagcgcattattgtcgacaatgccgtagcggaggcgtttatcccgctgctggccaagcgcgccgccgccctgcctgccgccctcacgggcccggttgtcgatatgaacaccatcgcccgctgcaacgcgctcattgacgatgcgttagcgaaaggcgctcgcctgctgaccggtggtaaagccaacgatacccatatgagcccgaccctgctggacggcgtgacccgcgagatgcggctgtggcgtgaagagtccttcggtccggtgaaagcgattattcgcgttcatagcgaagaggaggcgctggcggtggccaacgacagcgagtatggtctttccgctgcggtctacagccgcgacagcgccagagcgtggaacgtagcgcaacgtctgcataccgggatttgccatatcaatggcccaacggtgcatgatgaggcgcaaatgccgtttggcggctgcaaagcctccggctatggccgctttggcgggcgggccgggatcgcggaattcaccgagctgcgctggataacgatccagacccagtcccgcgagcttcccttctgaggcccagcgcctcttaactatggctggcgataagctgcgccagcccctgcggattttcccacgccatcgagtgtccggcatggggcacgatgccgaccgggatcccttgtgcctgaacgaggtcgctatccgcataagggagcgaccgttctccgacgatcagcattttctggcagcgcagctggcatagctgggtaaaccagggcgtgtcgctgccgcgtatcaggctgcaggcggcccgccagacggcccagggggcgctgttttgtaaacaacccgcccacggcgagcgctcctccgccagcagcctggcatagccgtcagcgacaaaggctgactctgactgcgccgcaatgcgcctgctgtactcgccgccgccggcgaacagattaggttccgagaccagcagcgtggtcacccgctcgcccagtagccccgccgcttcgatggcgatgctccctcccatgctatgcccgaacagcgcgaagcgctgcaggcgcaggtggctgaggaactgctccaaaactaaagcctgctcatgtatgttgtaactaaacacgcgcggtttatcgctatagccgaagcccggcagatcgatgagtattttgcgccgttcgcggagcgcgggatcgctggcaatgcggggataatcgtaggatgacgcgcagccaaggccgtggataaacaccaccggaaggccatctcccgggaaatcgtgccagcgcagcgtggcgccagcgacggacgaataaaaaccgttcacctgtatgcctccatgataaggttactgtttttttatacagtaaccttatcctttgtgctacccctttctgccgtctagcgcctgagggttaaaacagcgagacgagcaacgccatcgggaagctgaacggccaggtggcgccgatcagcagggccgccagcaggcggatcatccggctctctttggttaaaaaccagctgatcacggcgcatatcacgcccataatggcgtaaaacaccaacattttttgatataacgtcattcttactttttccttccctgaggggcgttccatggtgggatgattatctgccatgacgtcgtgattcagagatacctgtataacaaaatcagaaacgggctgaatattcagaataaagcctgattcgtcttaatctgatagcgcaaccgctggcgccgtactatacctttaggacttactcattagggtggcgctatggatgtctccagtaaaaccgtcgttatgattaatgtctgcgccgcgttcgcgcttatcagcctactgtccgtaagatttggctggttttaatcatttaattcagcaacgaaacctaaaaaagcagccctggaggctgcttttttacgcgcgaacaacagagttgttatcttgctgtcgggcggcgggggctaactgcgcggcagctattaccttattaagtctggggttatagcgcggcagtacattgactttttcactatcccactcggcggcggcgcagacggcctgccctacgcccatcatctcacagctttggattcgtttcgccggggcattaccatagctcagcgccacagcgccgatagccagcagaataaaagcaaaaattttcacagcgacatcaacgtcaaaacctaatatgccctaaatgatcgcatgagcggcggcggaaagtcaaacccggggcgcgctaccgggcggcatccggtatttgcctctgcctcagggctataaaatattcagaacaaatatcatgcgataaccgtaaatattaaaagcttatctctagccgtgaaatactttctgttcaggggagttaatttcgctaataaggaaaatatttcgccgtcggcaaggggaaaaggatcgccgccttcgccacaggcgcaatatatcgcgcgggccgtcatcgtaagaagataaatggcgatggcaagccgttgtaacataacctcttcatctccgtcatcacggataagagccagaaatagcgctaaatgacaacaaatatcatttgccttcgcgtcagataatacttacattcataaccattggtaatgctttagcgcagttcgcgctgtgaatttcgaggtggatatgtccggaatcatcacgctggtcatcgcgctaatcctgctggtcgcggcggtgtataatcttatttcctacattcgtgaccggcgcagcgccagcctgcccagcaaaaaaaccaagcgctgaaagtaattaaagcggtattcttgttaccccggcgcgactggccggctcatctcttcgctcttctgcgagcacaaaaaagcccctgccgacagacaggggccgcaattcggtcgcgaaccgcgatgttgccgccccacccgccgggcgctgtgcgcccagggtgactggcggaccccatccggcgcttatctccggcactcatgatggcttagctcttgaaggggcatcagaataatctcatatcccctgggttgagttttgacaatttttgccattgtgactattagcggcctaacacacccatcgcgcaatagtcgcctggcgctaaatgatcaatcctttagctatgcttaaccatcacatggcggaccacggtataatcctcaaggccatacatcgacatgtccttgccgtagcctgacagcttctggccaccgtgcggcatttcgctgaccagcataaagtgggtattgacccaggtgcagccgtactgcagcctggcgctaagacgatgggcgcgaccgacatctttcgtccataccgaggaggccaggccatactgagagtcattcgcccagctcagggcctgcgcttcatcgctgaaaggcgtcacgctgactaccggaccaaacacttcgcgctggacaatagcgtcttcctgccgggcgccggcgagcagcgtcggctggaagtaatagcccgcgccgtcagcccgactgccgccggtgaccaccttaatgtgcggcagcgcccttgcggcttccaccgccgcgctaacgcgctcaagatgggccagcgagctcagcggacccagttcggtggcagcgtcctccggcgcccccattttcaggctggccaccgccgccccaagtttctccaccagctggtcatagataccctgctgggcgtagatccggcaggcggccgtgcagtcctggccggcgttgtaaaaaccgaaggtccgcaccccatccaccaccgcatcgatgtccgcatcgtcaaaaacgatcactggcgccttaccgcccagctccatgtgggtgcgtttaatcgacgaggcggtatggccaatgatatgggctccggtggcaatcgatccggtcagggagaccattcgcactttaacgtgggcggtcaaggggtcgcccaccgttttaccgcggccaaacagcacgttgataaccccctccgggaagatatcttttgccagctccgccagcttcagcgccgtcagcggggtgatctccgagggttttatcactacgcagttgcccgccgccagcgccggggccagcttccaggccgccatcatcagcggatagttccacggcgcgatggaggccaccacgcccaccggatcgcggcggatcattgaggtatgcccttcgagatactctccggccgccatccccggcaggcagcgagcggcgccggcgaagaagcggaagacgtcgacgatggccggcatttcatcattaatcacgcagtgcagcggcttgccgcagttcagcgactccagctgcgccagggtttcagcctgcgccgagatggcgtccgccagcttcaggagacattccgcacgcgtcttcggcgtcgtctgactccaggcatcgaatgcccggtccgccgcctcaacggcggcatcgacctgggccgctgtcgcttcggcaatctccaggatcacttcgccggttgcagggttatataccggaaccttctcgccttcacctgccactaacttaccgtttatcaatagattgtgttgcatagcattatcctgtttcatggttttatttcccgtttccggcgtcgttatcgccgtcgcgggtgagccaccaggcccctaagattggtatcgtcgttaccagcatcaccaacagcgcgacaacgttggtgacgggcacatctcgcggccgccccagctgattcagcaaccacagcggcaaggtgcgttcatgccccgcggtaaaagtggtaacgataatttcatcaaacgacagagcgaatgccagcattccccccgccagcagcgccgaccccagattgggcagcactacgtaacgaaaggtctgccaaccggtagcgcctaaatccatcgaggcttccaccatactccacgaagtccggcggaaacgggcgatgacgttgttaaacaccaccaccacgcagaaggtcgcgtgccccaccacgatcgtcagcaggccaggctcaaggccgaccgctttgaacgccgtcaggagtgccaggccggtaatgatccccggcagggcgataggcagcagcagcagtagcgacaccgcatttttgccaaaaaaggcgctgcgccacagggctcctgcagccagcgtgccaagcactaaggcaatggcggtcgacagggcggcgatcttaagtgacagtgtcactgcctgcagaatgtcgctgcgcccggccgcctcgctgaaccagcgcagcgtcagcacctgcggcggaaagctaaaggctgcatcttccgtattaaaagcatagatggcgataatcagcagcggaaagtggaggaatatcaccccgccccaggtcgccagtcgcagataccagggcgcgcgttcagagtgcatcgaaggctcccagacgtttcacgaacgccagatagagggcaatcaagacgataggcaccagggtaaacgccgccgccatcggcatattgccgatcgccccctgctgcgagtaaaccatattgccgataaagtatcccggcgggcccaccagctgcggcacgataaagtcgcctagcgtcagcgaaaaggtgaagatcgacccagcggcgatgccgggaatggccagcggcagcaccacgtagcgaaaggtctgccgcggggccgcgccgagatcggccgaggcctgtagcaacgatcccggaatacgctccagcgccgcctgcaccggcaggatcataaacggcagccagatgtagacgaacaccagaaagcgtccaaggccggaggtggacaaggtattgccaccgaccgccgggacgctcaacagcgcgttcagcgccccctccagtccaagatgaccgaggaaccactgcgccacgccatctttcgccagcagcagcacccacgcataggctttgacgatatagctggcccacattggcagcatgaccgcgatataaaagaaggccttcatttttccgctggtgtagcgcgccatataccaggccatcggcagcgccagcagcgcgctggccagcgtgacgcacagcgccatcaccagggtccgcacaataatgtcgtagttggcagggttgaacagcgcccgcaggttagccagcgtgaagtcgctggtcaccgacatggtgaagtcgtcaaaggtataaatgctctgccacagcagggtcagcagcgatcccagatagacgatgccaaaccacatcagcggcccgagcagcagtaaaaacaggcccagcgccggtcggcgccagaagatccccgatatgcgcccggtctgcgcaggaattattgccatggtcatctcagcctccgctttccagcggggtcatcgccgagcgcgaccatgacgcctgtactatttccccggttcgcggaacgctggccgccgccgcgccatcgatgttggcctggctgaccagcagtttgtcgccatccgcgaggcggagctcgatccgcgtcgccgccccctgatactgcaccgcctgcaccacgccctgcacctgcacctcgccgccgccctgcaggcgaacatgctccggacgcagcgaccagctgcccgccatcccgcacaatcgtcgggccgcctcggctgcaaaaacgttggcggtgccgacaaaaccggccacaaacgcggtcctggggtgcagatagagatcctgcggggcatccacctgctcaatgcgcccgttgttaaacaccgccacgcgatccgacatcgacagcgcttcgctctggtcgtgggtcacgaagatgaaggtgatccccagcgactgctgcagctttttcagctccacctgcatctgctcgcgtagtttcaaatccagggcgcccagcggctcatcgagcagcagcacccgcggctggttcaccagcgcccgggcaatcgcgacccgctgccgctggccgccggagagctgggagggcttgcgatgatgagcaaagccaagggccaccttctccagcgcctcctgggcgcgggcatggcgcgctttcttcgccatgcctttgaccatcaggccgtaagcgacgttgtcaaggatcgacatgtggggaaatagcgcgtagtcctggaacacggtattcacatcccgctgccagggcggcagttcgctggccggctgaccaaagatatggatggttccgccggagagctgctcaaaaccggcaatcagccgcaggcaggtggttttacccgagccggacggacccagcatcgagaaaaattctccatcgcgtatgccaatgctaaccccatccaccgcccgcacatcgccatacaggcgcgatacattctggaactcgaccgcgtacgtcattgtttgcctccgatccttagcggccgcccattatcgcaatatagtcctgagtccagcggctatagggcacgtatttcccgccttccgcaaccggcgttttccagaagtgaatgcggttaaactgctcatagccgttggtctcacagcctttatcaccgagcagcgcgctggctttacagccctcaggcaccaccggcagcgaaccgaaccaggccgccacatcgccctgcaccttcggcgtgagcgaccagttcatccatttataggcgcagaccgggtgcttcgcctcgctgtgcagcatggtggtatccgcccagccggttaccccctccttcgggaacacggtggcgaccggctggccttccgccttcaggccgttggcttgatagggccacgaactggaggcggctaccccttcgtttttgaagtcgttcatctgtacggtggcgtcatgccagtagcgatggatcagcggttgctggtcgcgcaggactttcagcaccgcgttgtactgggtttcggtcagttgataggggtcttcgatccccagctgcggctgggtggctttgacaaacagcgcggcgtcggcgatatagatcgggccatcataggcctgcacccgcccctggttggttttaccatccggtagatcctgcttgacgaacaccacgcgccagctgtccggcggcgtcgggaatacgcgggtgttgtacatcagcaggttcggcccccactgatacggcgtgccatagactttaccgccgacgttaaaccacgcccccttcgcaatacgcggatcaagggagccccagccggcaatcagcgccgtgttgatcggctgcacgcgtttgcccatgatcaggcgcagcgaagcatcacccgaggcggtgaccagatcgtagccgcctttggccatcagactgaccatctcgtcagaggtggcagcggttttgacattaacctggcaaccggtgtccttttcgaactgactcacccagtcgtactgtttgtcggtctgaccgcgttcgatatatcccggccaggcaataatatcgagccgcccttccggtttatccagcgaggtgagcggctctgccgcctgaacggtcaaacaagccatacccagcacataaaggctgcaacgggcaatttttttgctcatcaggtgttactcctgtcacaaaggaattagcggcagccgtgccgtaaaaatatctcctgaaataagggtagtcagcggattaacgcccccaggggaatttattcaggttgtgacccgggacgcattacgtaaaaatcgccaacacaagcaggactttatggattatagacaacgagttagggaatgaggaggggtatgcatatttcctatggtgagcgccggtaaaataatgaccggcctcgataaaaatcctctttcgcttattttcgcagaatgtttatcatgagaaaaataaacgacagggtcaggcaagctgttcgcgaataagttcccccaggcgcttcaccccctgctcttcgcgttccccccagccccaggcggtattaaaacggaaaaacgaggtccagctgtcggaggtggagaacattttccctggggcaatactgatgtgcgacgccagcgcccgggcgctaagtgcgctagcgtcggccccttccggtagttcgatccacagaaagtagccgctgtcgctgtggtggacgatgacctccggcggcagatggcgcagcagcgcctgccaggcctgctgtttacgctccgccagctgacgacgtagacggcgcaggtgggcgtcatagcgcttggtggacaggtaatccaccagggctaactgcatcggcgaactggtggaaagcgtactcatcagctggagctgctggatccgccgcgcctgtttgccggccgccacccagccgatacgaaagccgggtaccagacattttgagaacgagctgcagtgcagcgtcatctcctggcgatcccagaacttcgccggtaacggcttttcgcggccaaaatagagctcgctgtagacatcatcttcgatcaacatcacgttatagcgcgccagcagcgccaccagcgccgcttttttttcagcgctgagggtgaagccgagcggattctggccgttggtcatcagccagcaggccttcaccggatagttttgcagggccgcctccagcgccgtcagatcaatgccttccctgacgtcagtggccaccgacaatgctttcaaacgcagcctctccagcgcctgcagggcgccgtagaagcaggggttttccaccaccacccagtctcccggctcggtcaccgcctgcaggctgaggttaagcgcctccagcgccccggcggtgatgacgatctcgtccggcgagacgttcatcccctgcagggcatagcgacgggcaatggcatgccgaagttctgcattccccggcggcagattctcaatgacgctcatggcggtggcggttttactcacctgcgccagcgagcggttgagctgctgcagcgggaagagacgcgggtccggaaaggccgaggcaaagggcaacatcgacgcctggcggctggcctggagcacctcaaagatataggtattgatatcgacggcttcatcgcgagtgacctgggcaggcggcgccggctggcggagcttcaccggctggggggcaacataataacccgactgcggacgggcgacgatgcgcccctggctttccagcagctgataggcatggctaacggtcataaagctcatgccgctgctgatcacctgctcgcgcagcgacggcagccgatcgccaggcaaccagacgccaagggcgatctgctcggtcagttgctgcgccaactgttgatactttttcattgcggccgtccccgtacgataacgtcccattatcatatatcagttataaaaaaatcatagtttcctgtaactgttatatctgcagcggcggccgcgtcgccgtgatagcacgggatgggtttaaaatatcaccacccagaatagcgagattaaaacaaaccagaagataatcattacgccaagcgtaatgcacagactctgtaatcctttttcagacattggcattcccttttatttattcccgagctcatacagtacaaattagccgcggagccgacaatttattattatttaatttacgattaaccggctcagcgtttttacttattctcatactaatgagtgataataaatcagagtaaaaatccgtggcggatttcgtaagccaaaatatgagctacggcgggtggtaaggatatattatgccgaccaggtgactacgccataccggcggcagggccgcgtagccagccgttagcaataatatgacagacagcggaatagcgcctaatcaccttccgcagggattaatcaaggttgctcaaggatattttctcgccctggcaacagctgaaaaatcataacagcggccaactgttatgataaaaaatggcgtgactgcctctgcccctcagtcgtcactccacctaaaattgcgctgaatcaattttgttgtggagtcctgcatgttcggtcttgatgcattccatctggcgcgagttcaattcgcttttacggtctcatttcatattatcttccccgccattaccatcggactggccagctatctggcggtgctcgaaggcttatggctaaaaacaaaaaatcccgtctggcgctcgctgtaccatttctggtcgaagattttcgccgtcaacttcggtatgggggtcgtttccgggctggtgatggcctaccagttcggcaccaactggagcggtttctcacagtttgcaggcagcataaccggccctctgctgacctatgaagtcctgacggcattttttctggaagcgggcttcctcggggtgatgcttttcggctggaaccgcgtggggccggggctacactttttcgccacctgcatggtggcgctgggtactatcatctccaccttctggatcctcgcctctaacagctggatgcagaccccgcaggggtttgagatcgttgatggccaggtcgtgcccgtcgactggctggcggtgatctttaatccgtcgttcccctaccgattattgcatatgacagtagcggcatttctcagtagcgcgctgtttgtcggcgcctcggcggcctggcatctgctgcgcggcaatcagtcgccggcgatccgtaagatgttctcgatggcgctatggatgacgctgctggtcgcccccgtccaggcgctgatcggcgatatgcatggcctgaataccctgaagcaccagccggcgaaaatcgccgccattgaggggcactgggaaaatccgccgggtgagccaacgccgttgctgctgtttggctggcccgatatggaccaggagcgcacccgctacgggcttgagataccggccctgggcagtctgatcctcacccacagtcttgataaacaggtgccggcgttgaaagagttcgctcctgaggagcgcccgaattctactgtggtgttctggtcatttcgcctgatggccgggctgggcatgttgatgctgctgctgggcgtgctggccctgtggctgcgtcgcggcgaccggctataccactcgcggccgtttctgcgttttgccctgtggatggggccatccggcctgatcgctattctcgccggctgggtgaccaccgaggtgggccgccaaccctgggtggtgtatggcgttcagcgcaccgccgatgccgtttccgctcatggcgatctgcatatgtcggtcagtttattgacctttatcgtagtgtacagcgccgtcttcggcgtcggctacagctatatgctgcgcctgatccgcaaggggccgcaggagatgctcccggcgacaaccggtacgccagcccgcccgctgtccgccgccactgaaggttatctgcagaaggagtcccgctaatgggtatcgaattatcggtgatctggttcgtgattatcgtctttgccacgctgatgtacatcgtcatggatggctttgatctgggcatcggcctgctgttcagcacggtgcggggcggcggggatcgcgacgtaatggtcaacagcgtcgcgccggtatgggatggcaatgaaacctggctggtgctcggcggcgccggcctgtttggcgcctttcctctcgcctacgcggtgatcatcgacgccctgtcgatccccctgaccctgatgctgatcggcctgatttttcgcggcgtcgcctttgagtttcgcttccaggccacgccatcgcaccggccattctgggatcgcgccttttttggcggctccctgctggcaaccttcagccagggcgtggtggtcggggcggtgatcaacggtttcaccgtcagcggtcgcgccttcagcggcggcatgtttgactggctgaccccgttcagcctgttctgcggattcggactatgcgtggcctatgcgctgctcggcgccacctggctggtgatgaaaagtgaaggcgcgctgcagcagagaatgcgcagcgcatcgcggcagttgctgggtgccctgctggcggtgtttgccgtcatcagcctgtggactccgctggcgcacccggcgattgctgcccgctggttcagcctgccgaatctctatttcctgctgccggtaccgctgctggtgatcctcgttagcggctggctgtggagcacgctgcatcagcgcgaccgccatgtttcgcccttcacgctgacgctgggcctggtctttctcggcttcagcggactagggatcagcatctggccgcatattatcccgccggccatcacattgtggcaggctgccgctcccccgcaaagccagggctttatgctggtgggcgccctgctgattattccggtcattcttggctacacctgctggagctattacgtgttccgcggcaaagttcagcctggggagggatatcactgatgcgtactgcctggcctaaacgtctgctgtggctgatcgcgctctggggaggtagcgtactgacgctggccgccataagcctgctgtttcgcctgctgatgaccgccgcagggctaaaagtctgagtgggatgcagagaggtccgaaaagggacttctccatcttatcttcacttttgcctgatgaaatacggcgatacatctgaagaaaggatattgctatgaagaagttagctttactctccgccgtaatgacgctgggaatgtcgtcatgggcttttgctgccgacaacccgccgccgccggaaaaaggcgcgcagcatcagggtaaaccgccggtgaaaaacggccaacacgaaggtaagcaagcgcaatacaacagcaaacagccacaacgagacggcaaacagccacaacgagacggtaaacagccgcagcacgacggtaaacagccgcagcacaacggcaagcagccgccaaaagggagcgagcacagcgggaaaccgctgccgccgaaagcgtaacactctggcctggcttccgcgtcaggccttttttcatccttcgtcagccatcgttgacaaactcttgccgttctttgagatgcctggaaaaaagcctgcattgcgcctgacatagtatgtccacgccattgttccgtcgagaaaaggtatgttaaagagaagcataagcgccctgctgttactgtgcgcattattttccgggcatctgttagcccatcgtcagggacacgagtactttccggtgcaaagtctcgaacagcagctgctgcacgaagcggatagcgatgagcttcgcagccagcacgaggaggccgccgcagacctgcgcgaacatcaccgctggcaggacgaccgtaaaccgcgggcatcctgccaatagcatcgactcgaatcaggcccctttgcgcttcggcagcgtcttcatcagatcgtccgggctgacggaggccacaatgctgcccgggtgcggcattttgaggatatggtttttgatcttgccgaccacgtgcatttcgcacggacggcagtcaaacttcagggtcaggacctcatcgccatggatcagctgcatcggcgtggctttccagctcttgatggagcctttcgcctgcttcgggcagaggttgaaggcgaaccgcagacaatgcttagtgatcatcaccggcacatcgcccttctcttcgtgcgcttcataggcggcgtcgatcagctgtacgccatagcgctggtagaacgcccgcgccttgtggttatagacgttggcgaggaaggagagatgggtctcagggtagaccggcggcggtacggagaccggcttgcgggtgccgcgctgccaggcgttgaggcgcgcttcatccagcatctctgcagtttcccgacgcagctggttgagcaggctgttgggcacaaacagcggcggcagattaacctgcacctcgcgcgcatagtaaatggtttgccccagttttgtgacaccgtcacgcaggttggccagcgctttctccgcctggttagcttcggcgaactccccgtcaagggtgtgggtcacgctgacgccatcttcacaggtcatggtgagaaccagctgctcctgccagccgctcaacgtcacatctaccgcgatgcggcgttcgctggaggtctttagcagcgcctgttgccagttatgatcgaggttgcggttgagcggctgatgggggcgcactttatgcagatccgctggcatctcgttcggccatacccgataacggttttcgccggttttttccacggtattagcacggaagcccaccacttcgcgcttaatcatcacgttgagaccatcgccgttggttaacggttcactgacttcaacgtcgagatggtctttgcctaccttcagaacttcacccaccggcaggccgataaatttcggcgaatcaaaggcgccgatatcgcctttgcgggcattaacaaagtagtcagtgctgccccggtggaaggttttatccgtggacgggataaagaaatgctcggtgcgtccagccgaggcgcgcgccaggtcgccgcgatcttcgataatggcatccagcatttgacgatagtgcgcagtgatgtttttcacataactcatgtctttgtaacggccttcaattttgaaggagcgtacgccagcgtcgatcagcgccgccaggttggcggtctgatcgttatccttcatcgacaggagatgtttctcataggccaccacccgcccctgatcgtccttcagggtatacggcaagcggcaagcctgcgagcagtcgccgcggttggcgctgcgtccggtctgggcgtgcgaaatgtaacactgcccagaataggccacgcacagcgcgccatggataaagaattcgatagtggcgtcagtgtggtcgtaaatggctttgatttgactgaggttcagttcgcgcgccagcacgatctgactgaagccggcgtcggagagaaacttcgctttttccacactgcgaatatcgcactgggtgctggcatgcagctcaatcggcggcagatccagctccatgatccccatatcctgcacgataagcgcatcgacgcctgcgtcgtagagatcggtaatcagccgctgcgccggctccagttcatcgtcatgcagaatggtgttcagcgtcacaaatacctttgcgccaaagcgatgagcgaaaggcaccagcccggcgatatcgctcagactgttgctggcgttgtggcgggcaccaaagccaggtccaccgatgtaaacggcatcggcgccgtgaaggatcgcttcgcgagcgataccggcgtcgcgggcaggactaagaagttcaagacgatgattgtgcaggcgcatacgcgtgttgttatccagtataagggggtcgaaatggcggctattgtagtcagaaccgggcgcagacgaaaaccttttccgccgtcgctggacgacgaattttcacttttcaacaaagtattgacggaaaagatatttccctcaaatcacggcgaagagtactgtcatcacgtattccggattttcctcgtcacgttgtgagtggttatcatcagtcatcttgtctggccgcgggttcgctcgcggttttttcttttggataatggataagagaatggaaatgggccgcctgggcgccgcggttacgatacgcatgcgtcgcgtcgccggcgaaacgcctaccctcacccgcctgcagcgagtgccactccccttgtaagcacaaatccagcgtaccacttatcactaccacatgctcaatcacccctttctcatgcggcgttgattcgctcagcgcgccgggggcaagggttatcgaaaaatggtcaaagcgcagctcgggatcccacgggaatactggcgtcaccaccatcgcctgctgctgcggatcaaacgcggagggcgcggcgctggcgtccgggacgatgaacgccgaaaacggtacgttcagcccggtggcaatcttccacagcgtcgccaccgttggacttgattcattccgctcaatctgcccgagcatggctttcgacaccccggtctcttccgccagtcgcgacaggctccagcctcgctgctggcgcagggttttaagcgttgccgccagatgttgcgcaatattcatccttcctcctgtttttactgcgcaaagtataccgccatttgtctgattttttcaggacgtttaacggcatcgtacgccactggcggcgagtttttctcccagggtagctgcgcgaaccaccgcttgtgcgctataacgcacaatgatacattgaatggatgttataacgcacatgagaatcatctatgcgctcgtttagtcttccgcttcccactctgttcgctggcttcgtcgccgtgttggtggggtacgccagctccgccgccatcatctggcaggccgccgccgcggccggcgctacccccgggcagatcgccggctggatgacggctcttggcctcgccatgggcatcagtactctcgcgctgagcgcctggcggaaagttcctgtgctcaccgcctggtcaacgccgggcgctgcgctgttagttagcggcctgcagggggtgaccctcgccgaggccgtggggatctttattttcgccaacgcgctaatcgttatctgcggcgccaccggcctgtttgcccggctgatgcagatcattcctcattcgctggccgccgcgatgctggctgggatcctgctacggtttggtttgcaggccttcgccggcttacaggatcatctgccgctgtgcggcgggatgctcgccgcctggctgctgtgtaaagcgctgtgcccccgcttcgccgtggtggccgcgctggtgattggagcgctgattgcggcggcgtccggggatgtggctagcgccgccgtgccgctggcatttgtgacgccggaatgggtcgccccgcagtttactccggcgcttttgctcagcgtcggtctgccgttcttcctcgtcaccatggcctcgcagaacgctccggggttcgccaccctgcaggcatcaggctataccgtaccggtctccgcactgatcgtcgtttgcggggggttggcactactgctggcgccgtttggggtttattccatctgcatcgcggcgatcaccgctgcgatttgccagagcccggaggcgcacccggatccgaaccagcgctggctggcggccatagccgcgggcggtttttatctgctggccggtctgttcggcgggtcaatcaccgccctgatgtcggccctgccgccggcgtggatccagatgctggcgggtctggcgctgctcggcaccatcggcgggagtctgtttcaagcagtgcatcaggccagtgagcgcgatgcggcggtgttaaccttcctggtcaccgccagcggggtgacgctggcgggaattggctccgccttctggggcgtggtgctcggcggggtgagttacggcgtgctatccgcgctgcgccgcccgtagctgggagggcgtcaggcggtggcggctttgacccgatggctgaaatggctgggggagctaaaaccacaggccagcgctatctcggttaacggcagcgcgctatggcagatcaggttttgcgccttcgccattcgctgctgcatgacgtactgatgcggagccatatttagcgactgacgaaacatacgagcaaaatgaaactcactcagacccgcctgctgcgccaggtcggccagggtcaagggctgatcgagatgagcatcgatccaggccagtacgtgacgctttacgcctggcgccagcccgccggtgaccgtcggcaaacgccactgcacggtggaatagtgctggatcagatgggtaagcagtaagctgctggcggcgctgagggtcagctggttcgccggctgccgccagtcgttagccagcaaaaactgacgatacactgcggtgattttatcatcgctggcgaaggtcttttcctgtagggtgaaattcgccgggctgcggtcccacacctcctcgccgacgcgacgcaggtgcgcatcggtacagtaaagatgcacaaacgacagatcgccgcggatatcccatacgctttcatcgcctttcggcatcagacaaaaacggtccgggccgccgccatttttccagccgtgcggcgtcttttgatagctttcgtagccatcagccacgtacagacttaaggtatgatggtcgctgcgcaccgtcacggtatcgcaattgttataccaggcggccagttgaataccggaattcagctccacggttcccttcagcaccgcgttctgtcgccgtaatgtttcaaatgtcccgtaacccatcgtcttcacacattgtctgtaaaagccctagtctagggagactacggcgcggtttccagtcctcaccgccagcggatggcaaataagcgcaagaatttgcaagccgacaacaaaccggtgaaagccgcagcaggcggcagccggcatactcctcccatcaacaggtagaggagaaccagggtgaacgcattactctatgcactcgttgtcgtgatctggggtacaacgtggattgcgatttttttacaacagggaccggtggccgcgccggtatcgattttctggcgtttcgccgtagccagcgtcacgatgctggcgattctgctcgtcacacgacgcctgcggccgctgggcgcgaaagatcatctctgctgcctgctgcagggctgctgcgtcttctgctttaatttctggtgtttttataccgccgccgcctggatcaataccggtctggaatcggtgatcttttcgatggcggtactgtttaacgccatcaacagctttctcttttttcgccagcagccgccgggccgcttctgggccgccgccgcgctgggtctcgccggtatcgtcatcctgttctgggacgacctgctggccaacggactgaacgcctcgctgctgtgggggatcgggctgagcgccctaggcacctacggtttttcgctcggcaatatgttcagtattcgccaccagcgccgcgggctggaaacgctgaccaccaacagctgggcgatgctctacggcacgctggtgatgggggcgatcgctctgctgcgcggcgataattttatgccagaatggaccgtcagctatctgggcgccctgctttacctggcgctgttcggctcggtcatcgcctttggcgcctatttcactctcgttgggcgcatcggcgccagcaaagccgcctacagtacgctgctgtttccgctggtcgccttatccatttccaccgtctatgaagggtatgtctggcacagcaacgccgtgatcgggctggcgctgatcctgctgggtaacctggtgatgtttgccaaaccggaacagctattgctgcgccgaaggctggcctgaggaggctgaagaaaaacagcgccgtcgtcagacggcgctggcacgattaacgctgagagggatcgaatttaacggcgtcgaccgccatatcatcgataacctgcttcagggtatcgacggtcagcggtgtattctcattcgccagggttttgccttcccctttccgaacgaccttgatgaccggcttattggtgctggcgtcaatgacctccgcctcaaagtacagatcggtgtccatggtacgatggccggtggcggcctgggtgccggcgacaatcatagcgaccgggatcacttcatagaactgcagcccctctttgctggagtccaccccggtgatcgccccgcggaagatgaggctgcgcttgccggcggtagtggccagcggtttacgctcggaaatagcctgtttcagctctttgttggtgtagttaagaatatcctgcagcgccttctcccctacctgggtggtcggcttcggtaccggatagtaggtcaccgggtgataaacaatattgtcatagttggccggattgaagttcggatcgatccagcgcagctccggcttgccggaggcagaggtcgtttctttcaaactggaataatcttttaagaagcccgaatactgatccggttgcgccactttcgccgcacagccggtcaacgccaatattcccgccagagcggcgactttcagtaaaacgcgagtacgcatagagagatccctgtaaatgcagttttttttcggcagacgttatagcaaataggacccactagttttgtgacaaaaaaagggcttcgtcaaggaagatttataaatattgattgcctgaacattacgttaataaataatcacttaaaaggggtatcgcgcggttttccaggctcattttcgccgcaacgggtctctgtcttgcccaggctctggcggggaatgcggcgcgggccatgctcagcttcccacgccgcggcgaatcaggcaggcttgcgcgccaacagggtggcgaagcgcaatttgatgcgattgccgttggcgtcggtgcgatgcagctcaccgacgtcctcattgtatttcagcagctcccagccctggtaataatcacgaagctcatcaggtttaaaggcaaacgggaagccgacggtgcagggatagtcttcggtatccatcgccgccacaatcaggttatagccgccggcggcggtgcagcgctgcatattggcgatcaggcccgggatggtgtcaggctcgaggaacatcatcactacggtggagaggatcaggtcatactcgccgccaaagctcaggctgttgaggtctttcaccgccgtttgcagattatccagtcgctcggcggcgcgaatactttccagattgttgacgctcatcggatttttatcccacgccgtcaccgcgaagccgttcgccgccagataaaggctgttacgcccgttgccgcagcccagatccagcgcccgccccggcggcacaatcgtcgcggcatgcagcacctcggaatgggtgcgggtcaggctgtatttttgactaaaataatccgcgtcacgctttgtcatgatccttccttcttattcaggagtgtttcccggtcgacctggagcaacagtttcccgctgaccaacagcaacgctgtacgcagcagcagcaggccgacaaccagattgctaaaaataaatagcggcatcgccagatgatgaaaaaagccgtctcccctggcctggccgagatgcagaccggtggtggccagcgaggaaatgccgaacgaaaagctccagaaagaagcattgaacggctgacgaagataccagggcatcagacggagcataaacagtagctgcagcaggccgtaaccaaacagcagcttagcgaaggtatcggcctccccgccgttgacgctgagccaggcgctgcaggccaccagcgcaggcgccagctggatccccagcgaggtgcgcagcggcgtcggcagctcgcctgcgctgcgcagacgctggaggatcgccggctcgaggctcagccaggagaagaccccggcgccgaggaacaccagtccggcatcggaaaatcccagcgcgccgcaggccatcgcgctgataaaattattggctactgtcggcagatacaaccccggcgtggtggcctcgcgaggatggttcccccgccatagcccaccgctttgccaggcggcataggcgagctgcagcgccacgcccggcacaaacagcccgatcgccagcggccggcaccagggagccaaaccaatcgccaccaacagcgtggtggccggaaacaggctgacgaagctgctgctcaccggatgacgcatctcccgcagcacgctcgccggaaagcggatcgcccggctgataaacgccatgctgagcaggacccacatcgccatcgccagcgtcaccagcccatcaccaatgctgcggctgaccggccagagggtgctggcgtaacgccaggcgaagcccattccgatggtgccgagcaccatgccaaaataacccgccggcaggtttagcacctgccgcggcgtttgcgttttattcattttattgatgatatcaatttaatttgaagttgcattttaaaggaaccttatcccgcgcgctatggcgatctttgctatgtttatgttaaccataagtaataaggatcggccatgcgtaaataccgtctcagcgaacagacccggcagtattgttatgaggaagagcatggcaaacaaagcgtcaccctgcgccagatcgtggcgcttattgatttcgctgacgtcaaagcgggcagcgaaggcggctgggtggatgaggaatgcgctctcagccagcagggggagtgctggatctacgatatcaacagcgtggttttcgccggggcgcgcatccgtgacgacgcccgcttaaccgggttctgcgtggtcagccatgaggccaccatcggcggacgggcctgcattcactcctcgcagatcagccatcacgcgcagatcagtgacaacgtcacggttatgcagagccaggtgcgcggttattgtcgccttgccgacgaggcgcgccttctcccccactgccaggtgattgccgcgcgcgggttaaccgccgatcgcgacaaagtcctgcagatctatcagcgagccaccgtcagcgcctcgcgcattctccaccaggcgcaaatctacggcgatgccttcgttgagcatgcgtttgtcgaacatcgggcggaagtgtttgaccaggcaagacttgaagggaacgaagaaaacgacgtctgggtatgcgataacgcccgggtatacgggcacgcgcgcctgatcgccggtcgcggagaggatgccattcccaccgtgcgctacagttcgcaggtggcagagaatgcggtgattgaaggcaactgcctgctgaagcatcgggcgatggtcggcggcgaggcgcagctgcgaggtggtccgattctgctcgacgacgatgtgctgatccaggggcggacagtcatcaccggcgatgtgatcgttgagcaccaggtctccatcaatgacgaggtgcagattgccgcacaggagggagaggccattcatctgcgcggcccgaaaacgcttgacggccagcagcacatcacccgcacgccgctgttaggcgcgctttaatgcctcatcgcggtcaataatgcgggcgtagatattctgatcgtcatagctaccgttcagatactcggcttgtcggagacagccttccagaacaaacccggtgcgcaacgctacctggttgctgcgggtgttcgccacccggcatttgatcacaaaccggcgcaccagcccgctggcggcataatggcggataaaggcctgtaatgaacgggaaagcagcccttgcccctggtgctcttcatcgatccagtagccaatataggccgttttattctgcggctcgatctgattgaacgacaggaccccgactagctgcttatcgagaaacagcaaaaacattttggcgtaatcccgctgatgcagcatcacgttgccctgcacatggcggcgggtctcgtcttcgctgcgcacctcggcgggccaactgagcgactgctgtagccagcgctggtttttgaccaccagctggtgcaggtcgctaacgtagcgctcatcaatggcgattagcgtcagcgcgtcggttaccgggatcgactcaggtactgctaggatatctgcggtcatagcgctctcttctggcccgcagggactgcctgcgggcgtcgggtgactcagggttatttcatgatccgatcgtcaacgtagtttcgtttatctgctgccggcgggaaatactgatagagccaggtttcgctgatggcttctccctgacagcgcaggaacagacgcatctccaccgggtcggttgagtcggtggtcggataccagtcgaaaaggatccggtagccatcgaacggctcgacgtagaggatctcaatctgcttcgcttccccgctggagagggtgatcaccggttcaataccgcgcggcgcggccgccttcaaatcgccgccgacaaagtcgatggcaaaacgacgcgcccacttatccgggtagtgttcacccggcgcccatccttcggggaagccccccatcccggtgcgggtggccagaacgcgcgccagcggagtgctcaccggcggctgcgcgctccagtaaagacggtagcggaagtccagttcgtcgcccgccttcaccgccttttccggctgccagaagcagacgatattatccagcgtttcgccggtagttgggatctccatcaggctgaccgcccctttgccccactggttacgcggctcaacccacaggctgggacgcttgttataccagcccatcacatcctggtagtgggagaaatcacggtccagctgcaacagaccaaagccgcgcgggttcttgtcctggaaggcattgaactgcagcttctgcgggttattcagcggccggcagacccattccccgttgcccaaccacattgacagccgatcggagtcgtggatttgcggatggatggtgtcgcacatccgccgctcattattgccgcagctgaacatactggtcatcggcgcgatacccagctgtttgatatccttgcgggcgtacaggtggttttccacgtccatgataacctgggtatcctggcagtggatggtgaacttgtaggcgccagtgatgctcgggctgtccagcagcgcgtaaacggtaaacaccgtggcgtcccctttgaccgtttcgaaccagaacgacgtaaagtcgggaaactcttccggggtatcggtaaaggtatccaccgccagaccgcgggccgacaggccatactgataggtgctgtctaccgcgcggaagtagctggcgccgaggaacgccacgatatcgcggcgcgccagctccggcgctttaaacacccggaacccggcgaagccgaggtcagactgtccttccagctgacgggtatccacaccggcgtcattgtacttaaacagctccggacggaagtggatctcgcgcgcctgctgggtgctggcgtctaaagagaacatccgcacgcggcgacggaaccccatcccgacgtggaaaaactgtatgtccagcttacgctcttcaatattgttccacagcgagtggttggcatcgtactggatgctgttataggcctgcggggtgagattggcgagcgtcggcggcagatcgcgcggggcgccgccccacggctggcgcgccagatcgtgagccatcgcctgcagaacagcataatcaaaacgacgcgtttgcccgtcggcaatgcccgcgtcttcggcaaaagcggcctgactgaataaggaagcgactcctgacgttccgcatacggcggcaacagccatggaagatttaagaaaacgtctgcggttcatgcctgagaaagcgtccttctgcacgggtgaattgattcgcaacgcgtcatcacgctgcgtgataatttccgcccactctagacaaaaacgattaataatccaattgttgccagcagaaaaaaggtaaaaaagccctgtccagaggaacagcctgtttttttcatttcctctgacgtgtagccagggcatacacgctgcctgccgctttttacccctgactattcaagggaaatctattctccagtgctgaatattcaccccatgtatcgctcctcgccgcgcgcgttttttaggcacgattcgcgcaaatttccatcgcgcctggtgctaacttttccccgataaccgctatctttcttcacgttagcggccaacaggggagagccgttcgggctgtcccgccacgctctccagggaattcattcaggagtcatgccatgcaagtgaaagcagccgtcacgctgggctaccagcagccttttgtcatcaaagacgtcgaggtcgccccgccggggaaggacgagatattagtgaaaattgtcgccaccggcgtctgccataccgacgccgtgatgcgcgacaaccccggggtggtgcctatgccggcgatcctcggccatgaaggcgccgggatcgttgccagcgtcggcgaggcggttagcggcatcagggtaggagaccacgtggtgctcagctacgccgcctgccaccactgcgaaaattgtttaagcaaccacccttcggcttgcgaagattttaatacgcttaattttggcggccgacgcgaggatggcaccaccccctaccggctggaagaccaggatctgtccctgttctttggccagtcgtctttcagccagtatgtggtcacccgcgccagcaacgcggtcgtggtcgacccggaggttgatctcaccttgctcggcccgctgggctgcggtatccagaccggtagcgggacggtgctcaaccgcctgaaaccggtggtcggcgaatcgctggtggtgtttggctgcggcgcggtggggctcagcgccatcatggcagcgaaattaaccggctgttcgcagattatcgcggtggatatccatgccagccgcctcgccctggcgggcgaactgggcgccacccatcagatcaacggcaaggaacaggatgccgtcgccgtgattaaacaaatcaccggtaaaggcgcccactacgcggtggaaacgaccggcgtctccgctatcgttctgcaggccgtacacgcggtgaaaccgctgggaacggtggcgattgtgggctttaccggagatatcacccttaacgtgcagaacgacctgatggcggagggaaaatcgctggtcggggtgattgaaggcgacgccgtgccggcgctgtttattccgctgttggtgcaactctataaacagggaaaattccctatcgataagcttatcgcccgctatccgttggccgatatcaatcaggccttcgccgattcggcgtccggcaaggtgatcaagccggtggtggtcatgtgagataacgtcgccaccggtcggtggcgacagttgcgcattatgggatttattccagcgtcacgtgatgcttcatcacccggcgaaacagcgccagtctggcgcgcataaagcggttctccactttaaacccggcgcgcttatgcaagccaatgcgcaacaggcgatcccgcccgcgcaggcacgccggccagcgcaccgcgccggaaagcgtctgctcgccgctggcgaggcgggcaaactgcgcccagtagtcagcgacctgagcggcgaaggccagatccgcttcgctggcgtactgccgcaccgggtcggtcaaccgcaggttatcaaacacgtagggcacctcgttgccatgccaggccccatgcgggtaggcgtcatgctccgcttccgcgacataatcaaaccagtagcgccagcacggctgacccacgcgctgttgcgcctgcatcactacataaccaagggtggtgaaggccatgtcgcggcatacttcccgccccagcgattcatcgcccttcacgccgggatagaggagtttgatcagccccagccccagacggcgctctcggcgcagcttctggatctgcccggcaatatcgacgccgaacacggccatcacgctggcttcatcgctattggagccgatcatcaccggtatcggatgctggcggccggcaaagaaggtctccagcatcggctgcggcagcaccgcgtctccggcaataggcgctggcccggtattcagcggcgcggtgagcgaccagaaggcctccgccgggatcgcccgcaattcctcagcgctggcttgcggtaaggcgaagtgttccgccagcaggcgccctttttccagcgctttttcccgcggcagatcgggtagcgtatacccgctctgaataatcgctttatgaaacagccctttcgctttcggggaggccattagcgacagcacgctgcgcgccccggcggattcgccaaacagcgtgacgttggcggcatccccgccgaaggcgtggatattctcctgaacccactgcagagcggcaatctgatcgagcaacgcgaaattatagagacgttcgcccgcctcttcttccagcgccggatgggcgaaaaagccgagatggcccagccggtagttaactgtcaccaccaccacgtcgcggctggcaagcgctttgccatcgtaaggcggcaggctgccggcgccgatggtaaacccgccgccgtgcagccagaccatcaccggcagcggctgcgctgcgctggccggggcccagacgttgagatataagcagtcttcgctgaaggcgccaggatcgccgccgccgagctcgcggcagtagtcaatgtcctgccagctggcggcggaaaaggtctcggctggacgtaccccctgccagcgggcggctggctgcggcgcgcgccagcgcagcgggcccacgggcggcgcggaatacggaatgccgcgccagatatgaatcccctgttctgcgctcccggccagcgttccctgacgggttttcgccaacggtttcgacggatgttgcataacctgctccctgtaaggctgatgccagcagggtactgattttacagcagaccgcaacgtcgtttgctgcgctcctccgcctgtcggtatagttcaaactcatcctgcaccgggcagcccagagctgcctcaaacgcctcgcgactggcgttcccgtggctgcgcgcctgggtttcgttgcccagattggactgaaaaatgcccgccgcgctgaccggtaaaaaatcttcataaataatcggctgggcgaccacccacccgcgctcaatcagcggctgcggatcgtcgcccgggcgaaacgcctggcgatgtgcctcacccgtgggcgtcaggcggtagcgaaaccaggccagcccctgctgacggagcagaaattcgctgtcgggaaattcgctaaacacctcctggagatgctgctggtggctgagattgtctttcccggttcctgccgcctgcagcagccgatcgtacagcgcgcgccctttcggcgtcagcgccacgccccgctgctcaatttcgccaaagcgggcgctatgggtgcctcggtgttctccggcgaacatcaccggctcctcaagcgccttaaagctggtctgccgcaggaggatcgggacctcccggcgcggtggcccttcaatcaacgctttgggttcaataccgcactccggcatcagggactggacgcggtcaatatccagcgtccgcggcgtgagatggttgatatgacaccccgggaaacagaccacatcggcaatcaggcggtgctcgcgatgcagagcatggtaagtctcctcatcgacggtggcttgccggtgccagcggaacgtctccagcgcctcctggacaaactcgcgcgcgtcggcagaggtgaattcgccctctgcttcatactgcgcaatcagcgccaggcagcggggggtgaagattttgcgccgcgcgaggatcgcctcggcccgctcgcgcagggcgcgattttcaatcagctccaggcgcagcagcgaggtgaaaatccgaaatggattgcgcgccagcgcggcatcgtcgatgggacgaaacgccgtggagtggaccggcacgccggcctgcgagagatcgtaatagctaacgggatacatccccatgatggcaaacatgcgacggagcgtcgccagttcttccgctgtgcccacgcgaatcgcgccgtggcgctccacgtttaagcgcgccagctcgtcagcgttagcgagctgttcatgcagctgcggattattttccagtaccgccaggttgacgtcagccaccagctccagcagcgttccgtactgcggaacttcctgctggtacatggccgacatggcctgcgaaaagtgctcccgaatctcatcagccgtgatggtgttcgccatgatgtgttacctccagtgaatacttcctggagtgtaggaaagctgcctcgccgcggggggaagaatttacaaactgtgatggcgataacctgccgccggtccaggtcattgcgcaaaacataacccatagttatgaaaaacacccggtaatttcactttaaattaacaatacatttacacacactgcttctgtcgacattacaacaatatgcccctctaccgtctacacggagtaccctatgaacgacaaatggtccccacgtgaggttgtccatcgcgattacagtagccacccgcccgcttacgcgccgggctataaaaccagcgtcctgcgctcgccaaaaaacgccctcatctctctgcagaactcgctgtcagagatcaccggcccggtatttagccacgacgacctcggccctctggataatgacctaatcctgaactatgccaaagaaggcctgcctatcggcgagcggatcatcgtccacggttacgtgcgcgatggattcggccgaccgatgaaaaatacgctggtggaagtctggcaagccaatgctggcggtcgctaccggcataaaaaagatcagtatctggcgccgattgacccgaactttggcggctgcggccggatgcttaccgatgaaaacggctattactgttttcgcaccatcaaacccggcccctacccctggcgcaaccaggccagcgactggcgtccggcgcatatccatttttctctctcgggcgacgcctgggcccagcgcctgatcacccagatgtattttgaaggcgacccgctgattaagcagtgcccgatcgtcaggactattaagaatgacgacgccgtgcgcacgctgatcgccgagctggacatgcacgccgccgtaccgctggattgtttggcctaccgcttcgaccttgttctgcgcggccaccgcgccacgctgtttgaaaatcgcactcagggggccgcccgatgaaagagtatctgcctgaaaccgcctcgcagacggcgggaccctatgttcatatcggcctggcgccggacgccgcaggctttcatatttttgagaaaaattttggcccggtcctcactaccgccgataccgtcggggagcgcatcaccattgaaggccgggttatcgacggctccgggacgccggtccgcgatgtgctgctggagatctggcaggccaacgccgcgggtcgctataaccatcctgacgatcgtcaacagcagaaagccgtcgacccggccttccgcggctgggggcgtacctgctctgatttcacctccggcatttggcgctttgaaaccatcaagccgggcccggtggccggtcgcgatggccggctgatggcgccgcacgtcaacctgtgggtggtggcgcgggggatcaatattggcctgaatacgcggatgtactttgccgatgaacacgcggccaacgccagcgacccggtgctgaatctcatcgagtgggaggtgaggcgcaaaaccttaatcgccgagcgcgaggttcgcggtacggaagtggtctatcgttttgacattcatctgcagggcgagaacgaaaccgtctttttcgatatttagccgtcgcggtgaccaccaccttcgccccgtttctgcggggcgaaggcgttttcaaccacagggaaagatcttgtcatgtaaccaactcaaatgttaataatattttgctatctggttatcaaatttaaacaagtccgcttgtctctttcaccgctgtgtttttaacatcatcttactatggaaaaaaatggtctcttcagtcagcgcattcgcttgcgccatctacacaccttcgtggccgtcgctcaacagggaacgctggggcgcgcggctgaaacattaaatctgagccagccagcactctcgaaaacgcttaacgagctagaacagctgaccggtacccggctgttcgagcggggtcgtcttggggcgcagctaaccctggtcggcgaacagtttctgacgcatgccgttaaggtgcttgacgcccttaattcggccggccaggcgctgaaccgcaaagagggcctgaataacgatatcgtgcgcatcggcgcgctgcccaccgccgcgctggggatcctgccgacggtgatcggccagtttcacaagcagcaaaaagatatcacgctgcaggtcgccactatgaacaacaccatgctgctcgccggcttaaaatccggggagatcgacatcggcattggacgtatgtccgacccggagctgatgagcgggctgcattacgaactgttgttccttgaatccctgaagctggtggttcgcccgggacatcccctgcttcaggagacggtgacccttagtcgggtgatggagtggccggtggtggtctcacctaaaggcaccgtgccgcggcaaaacgccgaagcgctgctccagagccagggctgtaagatgcccgccggctgcatcgagaccctctccgcctccctgtcgcgccagctgacggtggattttgactatgtctggtttgtcccttccggggcggtaaaagacgatcttcgccgtggcgtgctaaccgccctgccgatcgccacccagggcgccggagagcccatcggcattttaacccgcgtcgatgcgacactgaccccgggtacgcagacgctgctcagcgctatccgtaagtccatgcctgcctgacccccctttctccccggcccgcagcggccggggaacctgcaaacgcgccgacgccgctccccatgacgttagacatattcggcaaaataatcatttagtgcgaaattatttattaacatttgcgcaaacttctttaacagatctatcatgtctcgatttcaccaaatggttcactcgaaatctaatcaagcaacaaatacagttttatgaaggttaaaaccacttcattcaaaaatgattcaaaagcaacatgtttcatttggttcgcagtgaggtggctggtgtggttaaggagattacatggcaactggcaacgcgccggcgcggattcccccggatcctgcagtggcttctcgccggactgatgctcatcatcggtctggctgtgggtattcttggggcaaaactggccctcgtcggcggtacactgtacttcgcgctgatgggcgtggtcatggtcatcgcggcggtgttgattttccgcaaccgccgcggcggtattctgttatacgccgtggcgtttatcgcctcggtgatctgggcgattagtgacgctggctggaactactggccgctcttctcgcgcctgtttgcgctcggcgtactggccttcctggccgccctggtctggcctttcctcgccagcccaccggcgaaaaaaggcccggcctatggcgtcgccgccgttctcgccgtggcgctggcggtgagctttggctggatgttcaaatccgcaccgctggtcagcgcgactgaagcggtaccagtcaagcccgtcgcgccaggcgaacagcagaaaaactgggcgcactggggtaacaccacccacggcgaccgtttcgccgccctcgaccaaatcaacaaacaaaacgtcaaccagctgcaggttgcctgggtagcgcatactggcgatatcccacagagcaacggctcgggcgcagaagatcagaacaccccgctgcagattggcgatactctctatgtctgtaccccttacagtaaagtgctggcgctggatgtggacagcggaaaagagaaatggcgctatgactccaaatcctcttcacccaactggcagcgctgccgcggcttaggctattacgaagatagccaggcgcaaaccgcgccagcggcaggcacgcagccggccgcctgttcccgtcgtctgttcctgccgaccatcgacgcccgcctgatcgccattgatgccgataccggcaaactgtgcgaaagcttcggcgatcgcggtattgtcgacctcagcgtcggcatgggtgaagtgaaagcgggttactatcagcagacctccaccccgctggtggcgggcaatgtggttgtggtgggcggccgcgtcgcggataactactccactggcgaaccgccgggcgtggtccgcgcgtttgatgtccacaccggcaaactggcatgggcgtgggatccgggcaatccagcgctgaccggtgttccgccggaaggccagacctacacgcgcggtacgccaaacgtctggtcggcgatgtcctacgacgcgaagctgaatctgatctatctgcccaccggcaacgccacgccagatttctttggcggcgaacgtaccgcgctggacgataaatacagctcctctatcgtggccgtggatgccaccaccggccaggtgcgctggcacttccagaccacacaccacgatctgtgggactttgacctgccgtctcagccgctgctgtacgatctgcctgacggcaagggcggcaccaccccggtgctagtgcagaccagcaagcagggcatgatctttatgctcaaccgcgagaccggcgagccggtggccaaagtggaagagcgtccggtgccggcgggcaacgtcaaaggtgaacgctactcgccgacgcaaccttactcggtagggatgccgatgatcggcaaccagacgttgaccgagtccgatatgtggggagcgacaccgatcgacctgctgctgtgccgtattcagttcaaagagatgcgccatcagggcgtctttaccccgccaggtgaagatcgttccctgcagttcccgggctcgctcggcggcatgaactggggcagtgtttcgctggatccaaacaacagcctgatgtttgtcaacgatatgcgtctgggcctggccaactatatggtgccgcgcgcgaaggtggcgaaagacgccagcgggatcgagatgggcatcgtgccgatggaaggcacgccgtttggcgcgatgcgcgaacgtttcctgtcgccgctgggcattccgtgccagaagccgccgttcggcaccatgtccgcggtagatctgaaaaccgggaaactggtgtggcaggtgccggttggcaccgtagaagacaccgggccgctggggatccgtatgcacatgccaattccaatcggcatgccgacccttggcgcatcgctggcaacgcagtccggactgctgttcttcgccggcacccaggatttctacctgcgcgcctttgataccgcgaacggcaaagagatctggaaatcgcgtctgccggtcggcagccagtccggcccgatgacctacgtctcaccgaaaaccggtaagcagtacatcattatcaatgccggcggcgcccgtcagtcaccggatcgcggcgattacatcatcgcctacgcgctcccagaccatcactgatcgacatacacaaaagggcccatccgggccctttttttatgagtgacgattcgccttcagcgtcggggattactggtcgccaaagtggatcacggtgcgaatcgatttaccttcatgcatcagatcaaaggcctcgttaatctgctccagcggcaggcgatgggtaataaacggatcgaggcgaattttacccgccatggcgtcttccaccatgcccggcagctgactgcgcccttttacgccgccgaaggcggaaccgcgccacacgcggccggtcaccagctggaacggacgggtcttgatctcctgcccggcgccggctacaccgatgatcacgctctcaccccagcctttatggcagcactccagcgccgcgcgcatcacatttacattgccgatgcactcgaagctgaaatccaccccgccgtcggtcagctcaacgatcacatcctgaatcggcttatcgtagtcgttcggattgataaaatcggtcgcgcccatctctttagcgagagtgaacttatccgggttggtatcaaccgccagaatgcgcccggcctgtgcctgcaccgcgccctggatcaccgccagaccaatgccgcccagaccaaagaccgcgacgctatccccggccttgaccttcgccgtgttatgcaccgcgccgataccggtggttacgccgcagcccagcaggcacactttatccaaaggcgcctgcggattgactttcgccagcgaaatctcggcgcaaaccgtatattcgctgaaggtgctggtgcccatatagtgatagatcggttcgccattgtacgagaaacgagtggtgccgtccggcatcagccctttaccctgggtggcacgcaccgcctgacagaggttggttttacccgacttacagaatttgcactcgccacattcggcggtatacagcggaatgacgtgatcgcccggcttaaggctggtgacgccctcgcctacttccacgacaatcccgccgccctcatggcccagcaccgccgggaagacaccttccggatcgtcaccggagagggtgaaggcatcggtatgacacaccccggtgtgggtgattttcaccagaacttcgccttttttcggcggcgcgacgtcaatctcaacgatttttaacggctgaccggggccgaaggccactgctgcgcgtgatttcataactgtctcttcctcgtcgtgatgttattttaaataggatcgtagcagatgaccgacctctgccattctcgcggcccgctgctcaggggtggtgtcgccgctgaccagctcgtcctgcaggtggatctccaccatttcgcccatcaggccgttcgccgccccgcgaatcgaggcgatctgctgcagaatagtcatacagggctcgccggactccagcgcgcgctcaagggcttcgacctggccgcggatgcgtcttacgcggctgagcgcccgttttttatcttcaggtgaatgtggcacgattacgcctccgtatcatataggggggtatactatattctattagcggtgaaggcaaaaaaaaccccgtcgcgggacggggtcaggaagtgaaagaggatgatttagcgcttacgaggcatcattcgcagcagagtattatccttccaccagtaatgatggagcagcgcggcgagagcatgcaggccaatcacaaagtacccggcattggccaaccattcatggatcgccttcagggtatccacccgctcaaaatcgctctgcggggcatacggcatggtcagaccaaaggcataccaggggttaccgcgccagtacatcatcaccatgccgatcaacggcaaggcaatgaacagcaaatagatcgccaggtgaccaagatgggcgaaaccggtcatcatcggcgatggtttcggtacgatcggcggcgccggcgatttcagccgcaccagcagacgcgccaccatcagcacgaaaatggtgatcccgcaggaaacatgcaccatattaatcaatggccgttcactgcgggggaaaaacccgcgcagctccatcgccgcataggctactactaccagcaaaaaaaccagccagtgaatcccaatctgcaggccggaatatttatcgcgcatggcatatcctttatggaaagtatgatgctgccaacatagcggcgttcccttaaattttcattaacctttacgtagaattaacaattgattaccgctttctgccgagccgctatgccacgcttagcgcacgctctttcctggccgaacgacaaaccgtccaccggtcattacaaaattacacagttttgttacttaccgcgctactgccgccgctatagtacagaatgtctggcagaccacacggccctgggagataagaatgaaggaaatcggcttaccgttattgctactgaccgcgctggccagtccggcttttgctgcagactgtcagccaaacggcattggcggctctttttgcattaacgatgacggtacgactaccgacacggtgcctaacgaagtcaacggcatggatacgtactcgaataatggcggctataccagttccctgcccgatcggtcaggggcggatgaagcactggaaggttcatcgctgtcgacgcagcaaggcgtcggcagcggacagagcgacagtgcgctggcgggtcgcgactggcattcgcccgccaatctgaatgatggcgccgccacctccagtatgagcctgctggataaaccctgaggccagcggctaagcgagactccagcctgcggcgccgatggcgagggcgaaaagcaggcaggccagcgccgtcttgcgtaacagcatggtatagaatgaaattgcgacgccaatgaataccaccagcagaatcggccacatgcttaataacaacagcagaaaaccctcaatattgttatggattacgctctccacatccgcatccttgcctcatcgtcgataaagtaagcagaatttaatatgtaacatgaatacattcaaataaaatataattgtaaatggttatgcaccgcctcctgcggttggcggtgggtcactttcacgcgtccggagctttggcatcaaaagcagttcgcaaaaaacacgtcaggattgttccatgaccctttagcggtacgctcgtattctcgctggtatcctgcaaattcttcacgccattattcggcgcgggtatctgacacaatgcgccggcgatgacagtcgcctggttgcagtttatccccctgagcggaacgcacatccagatactgaaggggctggccgtgcgcgttatccagcaggaccgaataggtttccccttgctcaaacatataacgctctccccattgccgcagcgccacaacaatgggaaacacggagcgccccttttcagtcaggacatattccttgtatgcgctgccatccgatgccggtaaaatctcgaaaataccgatatcaaccagatgcttcagccgcgaggcaaggatatttttggccagccccaaatttttttgaaactcgctgaatctccgcacatcgtcaaatgcttcgcggataatcatcaggcaccagcgttcaccaattgattccaacgttctcgccaccggacattcactggttctaagtgattcctgctttgccatctgcgcgctccttatcaatttatctactgatctagcttaatcctcacctttaccagttgcaaaaaaaaaccagcaaggctaattctataggtacactagttttaaaaagcaaccagacagagggtctcttatgaaatgtaaggcaagtagatgtaccggccaaaagatccaaactgcgtcagtccctgacacgatgctgaccacagggataacggcgttgttttcactaacctgcgcgctggcagtagccaatgtttattcagcacagcctttactcgactcgatggcggtcagcctgaaggtgtcgccaggcatgattggcagcgtcatcaccgctacgcaggcgggctatgccattggcctgctgttcctggttccgctcggggactggttgaaccgtaaatacgtggtgatgagtcaactgttgctttcagtagcggcgttagtcgcggcagggttatcccccaatatagtaactctgcttggcgccatgctgatcgtcggcctgatggccgttgtggtgcaggtgctggtggcctgggtggcaatactggcgacgccgcagaaacgaggccaggcggtgggtaccctgaccagcggcattgtttcaggcatcctgttatctcggtttatctcaggcgcgatagccgatatcgccggctggcgagccgtgtatctcacggctgcctgtctgatgttgatgattgccgggatcgtctggaaaatcatgccttcgcccccgcagcagccgcagccgcaaaagccgacttacctttccttattgaagtccgtgtttcagctgtacctcaccgagccgcaactgagaaagcgcgggatcctggcgctatttatcttcgccgctttcagcatgctatggacgaccatggtcatgccgctcaccgccctttccctctcgcacacccagacggggatgtttggcttagccggcttcgctggcatgctggccgccgccagagcgggcaagtgggctgaccagggatgggctcagcgcactaccggcctggcgctggcgctgctgaccatctcatggcttcctatcggctatgccgaaacctctctgctttggctgatagctggcgtcattgcgctggactttgcggtacaggccgttcatgtctccagccagagcctgatcattgccgccaggcctgcagcggcaagccgcctggttggggcttacatgtgtttttattcgctgggcagcgcggcaggggctatcgttgccacacagctttattcccactggggatggcaggcggtctgccttgcgggcgccgcggtcagcgcgtgtgcatttctgatctggtcaggatcgcgtcaatcatgatattcgttctgcgttttaaaggggccagtcaaaaagaccgtaacactgacctgattgctgccagctatttgtatcgcatacattttttcaatgcttttaaacagttatgttcatgttgtataatgacgtgcactttaactaaaaaaagagtgcgaccatgattgattcctcattgccattaaccgacattcatcgtcatcttgacggtaacatccgggcccaaaccatcctcgatcttggccgcgaatttaatatcgctcttcccgcaaccaccctcgacacgctgcgtccgcacgtccaggtcaccagccttgagcccgatctggttagtttcctcgccaagctcgactggggggtaaaggtcctggcctcgctggaagcctgtcgccgcgtggcgtatgagaacgtcgaagacgcggcgcgaaatggcctgcactacgttgagctgcgcttctctccccgctatatggcgatgacccaccggctgccggtcgacggcgtggtagaggcggtaattgccggggttcaagagggatgccgcgatttccaggtcgacgcccggctgatcggtattctgagccgcaccttcggcgaagccgcctgtcaggaagagctggcggcgctgctcgcccaccgcgagggcatcacagccctcgacctcgccggcgatgagctaggcttcccgggtacgttgttccgcaaccattttaaccaggcccgcgacgccgggtggcatatcaccgtccacgcgggcgaagcggccggcccggaaagtatctggcaggccattcgtgagctgggcgcggagcgcatcggccatggggttaaagcggtagaggatccagccctgatggactacctggccgagcaccgcatcgggattgaatcctgcctgacctcgaacgtgcaaaccagcaccgtggcctccctggcccagcatccgctgaagcagttccttgagcacggcgtgctggcgagcctcaacaccgacgatccggcggtccagggtgtggacatcattcacgagtataccgtggcggcgccggcggcagggctgagccgggagcagatccgtcaggcgcagatcaacggcctgaccctggcgttcctcggcgaacaggaaaaagccgccctcattcagcgggttgccaaaggctgataaccggcccggcagccgtgctgccgggctcctcctcagaccaggctgagcgtggcgcgatgtctggccgactcgatacccaactcaatcagggtcattatctgaatcgcctcgctggccgggaccgggttttcccctacgccgttaagcgcgtcgcggatagcggcatagtaggcgggataattacccggtagcgtcagccatttctcctgactacgttcatccccttcggcgcgggtcagggtaccgtcgcgcatatcatatccccagtcctcctgcggcagccgttcaccgttttttagccgctcctcctgcgggtcaaggccgtacttaatatagctggcccgcgagccgtggacgataaagcgcgcgctctccgcggcggcgagtaacgtaccatgcagtactacccgccgctgcggataggccagcacggcgtgaaaatagtcggtggattgcgcgccgggccgaagctgcgcgaggtccaccgtgatgcttaccggcaggccaaacagcaccacgacctggtcgagcagatgcggcgcgaggtcataccatatgccgctgccaggacccgcctgctcacgccagcgctggcgcacctgtggtcggaagcgatcgaaatgcgactcgaagtaacacacctcccccagctgaccttcgttgatcaacgcgctgaccgttaagaaatcgctgtcccagcgccggttatgaaacaccgaaagtatccgaccgcagtgcttcgccaggctttccagctcgcgagcttgtgacaatgtcacggtaaatggcttatccaccacaacatgctttcccgcctccagcgccgctttcgccagcggaaagtgggtgtcgttcggggtggcgatgaccaccagatcgatatccgggtcgtccagcagatcccccggcgcactcattaccttcacgccaggccaatcggcatggaccttatcggcgtcgctgctggcgaccgccttcagcgccatacccggcgtgccgccgatcaacggcgcatgaaacgttttgctggcgtaaccgaaccccaccagccccacccggatcgcatcgctcatcttaccgcctcgcttatgcaactgatatcaacaccaggttaatgagaataattttacaaaccgtgagcaaaacttatcattccttactttgcgacttacatgcaagtgtgagaaatcagacagataccccttgtgatctgctgaccatcgagtaacatttcacgctgtgttcaaaggatattgaagtgttatgacaactgtttttacccgtattgtagaacttattggctggattgtttttggtatttcggcactgcttttggttatcgcacaccatatagataactatcagtccccaccgccagcggatgtggtgcacacgaagtagctccgcgttaaaacagtgacccgcctcgcaactgtgcaaccggtttcagaaaccggttgcacgtatgctcgcgcttttattacactccctttatcatcagacagggagctttttcatggccgcttttccgcacaatttcttatggggtgccgctaccgcagcgtatcaggttgagggaggacacgacgccgacggtaaaggaccgtcaatctgggatatctactctcatctgccgggtaccacctttgaaggcaccaccggcgatattgccgtcgaccactatcaccgttttcgcgaagacgtggcgttaatggccgaaatgggcctgcaaagctatcgattctccatctcctggccccgcctgctgcccgccgggcgcggtaaggtgaatgaagcgggagtccagttttacagcgatctgatcgacgaactgctggcgcacaatattgagccgatgatcaccctctatcactgggatctgccgcaggccctgcaggatgagggcggctgggaagcgcgcactaccgccgaggccttcgccgagtacgcccgcctgtgctatgcgcgctttggttcacgggtgaagctgtgggctaccttcaacgaaaccattgtcttcattgggcacggctacattaacggcctccatcccccggcggtccgcgatccggcgcgtgctattcaggcctgccaccacgtatttatcgcccatgcgctggcggtgaaggcctttcgcgagatggctgtggccggcgagattggcttcgtcaacgtactgcaaccgcataccccgctcaccgacagcgaggcggacattaaggccaccgaactggctgacgccatccatactcactggctgtacgatccggtgctgaaaggcacctatcctgccgacctgctggcgcagacccaggcgctgtggggggtacctcgctttgctccaggcgacgacgcgctgctccgtgacaaccgctgcgactttatcggtctgaattactatcgccgggaaacggtatctgcccagccgcctgagatcgctaccggcggtgagcctggcgtggagggattattctatttcgtgcgtaatccccagagtacatataccgaatggggctgggaaatctggccgcaggggctaactgacggcattatgatgattaaggcgcgctatggcgatattccgatatatatcaccgagaatggcctcggcgcgaaggacccgattattgacggggaagtggtcgacgacccgcggattgattatctcagcagccatattggcgccctcgaaaaagcgctggcgctgggggcagatgtgcgcggctattacccctggtcatttatcgatctgctgagctggctcaacggctatcaaaagcaatatggttttgtctatgtcgatcaccagcaaaatctggcgcggaaacgaaagaagagtttttattggtacaaatctgttattgccagtcacggcgaacagcgttaatcttctcttgcgggcgccattcggcgcccggtctgattttagaatattcttaaacttctccctgctcttcaaggctggctttgccccttgtcatgggtttatataacctgattcattccacgcggccccagcagaaggcgccgttggttgagagtaggtttagtgaatgctgataatattcaacgcaataattccgattataaaatggatacgaaaatgaccgtgctggactacttattaaaatttcgcaaaatcagttcgctggaaagccttgaaaaactatttgatcaccttaactactccctgactgacacccaggagatcgtgaatatgtatcgcgccgccgatcatcgtcgcgcagagctggtctccggtggtaaattgttcgatgtgggccaggttcctaaatccgtttggcgattcgtgcagtaaggctgtcatccttcacgccagttgcttatacttcccggcctgattttattcactggcgttgaataggggagaaacatgacgtctcaatctgcagagcgcatcggcggatggctgctggctccgctggcctggttgctggtggcgctgctgagtgcctcgttatcgctgctgttttttgccaatgcgctgatgtcgccgcagacctataccctactgcgcgccatgagcgcgggccatatggcgctgtgggtcgcctcgctgctgtttgccctcgccatgtggtattacacgctctggctgactatcgcctttttcaagcggcgctcggtggtgccgaaacactatattatctggctgctcatcaccctgctgctggcgataaaggcttttgccttctcgccggtctcggatgtgcttgccctgcgtcagctgctgtttccgctgctgggcgctgcgctgctggcgccctattttcgccgttcgcagcgggtaaaacggacttttgttaatccgtaatacccccacacttaacctgttgtcgctggtatcgttttattcgataataagcggctttttttcgtttcaggtcgcatgatggctgattatttactgctctttattggtacagtcctggtcaataacttcgttctggtgaagtttcttggtctgtgcccgtttatgggggtttccaaaaagctggaaaccgcaatggggatggggctcgctaccaccttcgtgatgaccctggcctctatttgcgcctggctgattgatacctggatccttatcccgctaaatttggtttatttgcgtaccctggcctttattctggttatcgccgtggtggttcagtttactgagatggtggtgcgtaaaaccagcccggcgctctatcgcctgctggggatctttctaccgctgatcaccaccaactgtgccgtactcggggtagcgctgctgaatattaatctgggccacaatttcctgcagtcggcgctgtacggctttgccgccgccgtcggcttctcgctggtaatggtgctgttcgcggcgatccgtgaacgcctggtggtggccgatgtccccgcgccgtttcgcggtaatgccatcgcgctgattaccgccggtttaatgtctctggccttcatgggctttagtggtttggtgaagttgtaatgagcgcagtctggatagccgtgatcgccatcagcctgttagggctgattttcggcttaatactgggatacgcctcgcgtcgtttcgcggtgcaggacgacccggtggtggaaaaaattgatgagctattgccgcagagccagtgtgggcagtgcgggtaccctgggtgtcgcccctatgcggaagcagtcggcgtgcagggtgagaaaataaaccgctgcgcgccgggtggcgaagcggtgatgttaaaaatcgccgccttgctgaacgtcgacccgcagcctgtcgacggcgacgcacaggaagcggagccggcccgcatgctcgcggtaattgacgagccgaactgcattggctgtaccaagtgtatccaggcctgtccggtggatgccatcgttggggcgacccgcgccatgcataccgtgatgagcgacctgtgcaccggctgcaatttgtgcgtcgccccctgcccgacccagtgcatttcactcgttccggtggccaccaccccggagacctggaaatgggatctgcatacgatcccggtgcgaaatattcctgtggaacaacatgtttaagctattttccgctttccgaaaagacaaggtctgggatttcaacggcggtattcacccgcctgaaatgaaaacccagtctaacggcaccccgctgcgtcaggtttccctgccgcagcgctttgttatcccgttgaagcagcacattggcgccgagggcgaactgtgcgttaaagtgggcgaccgggtgctgcgcggccagccgctgacccgcggctggggaagaatgctgcccgttcacgccccgacttccggcaccattgccgccatcgctccgcacactaccgcgcacccgtcggctctggcggagatgagcgtgatcattgacgccgacggcgaagaccgctggatcgagcgcgatggctggagcgactatcagacccgcacgcgtgaagcgctgatcgagcgtatccaccagtttggcgttgctggcctcggcggcgcaggcttccccaccggcagtaaactgcgcggtggcggagataaaattaaaacgctgatcattaacgccgccgagtgcgagccctatatcacggcggatgaccgcctgatgcaggactgcgcggcgcagattgtcgagggtatccgcatcctcgctcatatactgcagcctgaagaagtgctgatcggcattgaagacaataagccgcaggccatctcaatgctgcgggcggtgctctgcgacgcccatggcatttcgctgcgcgtgatccccaccaaatatccctccggtggcgccaagcagctcacccaaattctcaccggcaaacaggtaccgcacggcggtcgttcatcggacattggcgtgctgatgcagaacgtcggtacggcttatgcggtgaaacgcgcggtgattgacggtgagccgttaaccgagcgcgtggtcaccctcaccggcgaagcggtaaccagaccgggcaatgtctgggcgcgtcttggcacgccggtgcgccatctattgaacgatgccggcttctgccccagcgccgagccaatggtgatcatgggcggcccgctgatgggctttaccctgccgtggctcgacgtcccggtggtgaagatcaccaactgtttgctggcgccttccgccaacgagatgggcgaaccgcaggaagagaaaggctgcattcgctgcagcgcctgcgctgacgcctgcccggccgatctgctgccgcagcagctgtactggttcagcaaaggtcagcagcacgataaagccactgcccataatctggcggactgcatcgagtgcggcgcctgcgcgtgggtatgtccaagtaatattccgctggtgcagtacttccgtcaggaaaaggccgagatcgcggcgattcgtcaggaagagcagcgcgctgcggaagccaaagcccgattcgaggcccgacaggcgcgcctggagcgtgagaaagctgcgcgcgccgagcggcataaaaaagccgccgttcagcctgccgccaaagatcaggaggcgattagcgccgccctggcccgggtacgggataaacagcgcgatgccgcgcagccgatcgtgatccaggccggcgccaaacctgacaacagcgaggcaattgccgcccgcgaagcgcgtaaggctgaggcccgggcgcgcaaagcgcagcagcaggacgccccggccgccgaaccggtcgacccgcgcaaggcggcggtggaagccgccatcgcccgcgccaaagcgcgtaaagccgaacagcaggccgcgccggtggaagccccggccgccgaaccggtcgacccgcgcaaggcggcggtggaagccgctatcgcccgcgccaaagcgcgtaaagccgaacagcaggccgcgccggtggacgccccggccgccgaaccggtcgacccgcgcaaggcggcggtggaagccgctatcgcccgcgctaaagcgcgtaaagcagaacagcaggccgcgccggtggacgccccggccgccgaaccggtcgacccgcgcaaggcggcggtggaagccgctatcgcccgcgccaaagcgcgtaaagccgaacagcaggccacacaacaggatctcgcgtcagccgcagccaatgacgacccgcgcaaagcggccgtcgccgcggctatcgcccgcgttcaggcgcgtaaagcaacacagcaggcagttaacgaggaataaatggttttcagaatcgcaagctccccctatacccataaccagcggcagacctcgcgtattatgctgctggtgctgctcgccgctgtgcctggcattgtggtccagacctggtttttcggctggggcaccgtactgcagattgtcctcgccgccctgacggcctgggcgaccgaagccgctattctcaaactgcgtaaacagcctgttgctgccacgctgaaagataattccgccctgctcaccggcctgctgctggcggtgagtattccgccactggccccgtggtggatggtggtgctcggcactgcctttgccgtagtcattgccaagcagttgtacggaggcctgggccataaccccttcaacccggcaatgatcggctatgtcgtgctgctgatttcgttcccggtgcagatgacctcctggctgccttcctatgagatagccgcccatatcccggcattcagcgacgcgctgcagatgatcttcaccggtcataccgccgccggaggcgacatggccagtctgcggctgggtatcgacggcgtcagccaggccaccccgctggatacctttaaaacctccctgcatgccggacatagcgttcagcaggtgctgcaattgccggtctacggcggcgtgctggcaggtctgggctggcagtgggtgaatatcgcctggctggcaggcggccttttcctgctgtggcagaaggcgatccgctggcatatcccggtcagcttccttgttagcctcggcctgtgcgccaccctcggctggattttttcgccgcagagcctggcctcaccgcagatgcatttgctctccggggcgaccatgcttggcgccttctttatcctgaccgatccggtgacggcctcaacaaccaaccgcggccgtctgatctttggcgccctcgctggcctgctggtctggctcatccgcagcttcggtggttatccggacggcgtggcgtttgccgttctgctggcgaatattaccgtgccgctgatcgattactacacgcgcccgcgcgtatatggccaccgttgagagagcaatgatgttaaaaacgatgcgtaaacacggcgtcacgctggcgctgtttgccgccggttccaccgggctgacggcggcgatcaatgagctgaccaaaagcaccatcgaccagcaggcggccctgcagcaaaaggcgttattcgaccaggttttacctgccgaccgctataataacgatctgcttaagagctgctatctggtcagcgccccggcgctgggcaaaggccagcataaagtgtggatcgccaaaaataacgatcgaccgatcggcgcggtgatggaagccaccgcgccggacggctactccggagcaatacagctgctggttgccgccgattttagcggcacggtcctcggcacccgcgtaactgagcatcatgaaacgccgggcctgggggataaaatcgaacttcgcctgtcggactggattacccattttgccgggaaagtcatccacggccagggcgatagccactgggcggtcaaaaaggatggcggcgattttgaccagttcaccggcgccaccatcaccccccgggcggtggtcaatgccgttaagcgcgcaggcttatatgcacaaacgctgcctgcgcaacttcctgaattcaccgcctgtggagaataaccatgagcgaagttaaagacgtcatcgtccagggcctgtggaaaaataactccgccctggttcagctgttaggtatgtgtcctctgctggcggtcacctcgaccgccaccaacgccctcgggctgggtttggccaccaccctggtgttaaccctgaccaacctgaccatctccagcctgcgccgctggacgccggcggagatccggatccccatctacgtaatgattatcgcctcggtggtgagcgtcgtgcagatgctgatcaacgcctatgccttcggcctctatcagtcgctggggattttcatcccgcttatcgtgaccaactgcatcgtggtcggccgcgccgaagcctttgccgccaaaaaagggccggcgctgtcggcgctggacggtttctcgatcggcatgggcgctacctgcgcgatgtttgtgctgggctccctgcgcgagatccttggcaacggcaccctgtttgacggcgccgacagtctgcttggcagctgggcgaaggttctgcgcatcgaggttttccacgccgacacccctttcctgctggctatgctgccgccaggcgcctttattggcctcggcatgatgctggcgattaaataccttatcgatgaacgtagcaaacagcggaaggcgcaagcggcccgggccgtctctgtcgccccgtccgacgtgacagggaaagcataatatgaacaaagccaaacgcctggcgatccttaccaggctgcgggaaaacgatccccaccccactaccgaactgcatttcagttcgccgttcgagctgctgattgccgtcctgctttctgcacaggccaccgacgtaagcgtcaacaaagcgacagccaaactctatccggtggccaatacgcccgcagcgatgctggccctgggggtggatggggtaaaatcgtatatcaagactatcggcctgtttaacagcaaagcggaaaacgtcatcaaaacctgccgcatcctgttggagcagcacaatggtgaggtgccggaagacagagcagcgctggaggcgctacccggcgtgggccgtaaaaccgccaacgtggtgctgaataccgcctttggctggccgaccatcgccgtggacacgcacatcttccgcgtctgcaatcggacgcagttcgccccgggcaagaatgttgaacaggtggaagagaagcttctgaaggtggtccccgccgagtttaaggtcgactgccatcactggctgatcctgcatgggcgttatacctgtattgcccgcaagccgcgctgcggctcctgcctgattgaagatctttgcgaatacaaagataaagtctacgcctgactgtctcgtctctattgcggtcatagcttaactctgggttatggcccgcattcatctatttcaccggccattaacaccacataatcatcatgattatggatgattatccggttatataacaaacaactagttcattcattttttatcagcgcaaaatttctatgcatttgtgatccagatcatgctcgcaactttatgttgaatgaatgttactggaatggaaataaatgtcaggcaatacaacggatgagtaaagattgtcaggataatgacccatgattttttaagataatggaccatatcactatgcttacgccagatcagtagaatatatcgccttttcccgacaaaccggcgaacccaaaagataaaaataccaacgatatcgaaacggtaaaatttaacgctgtataacattcatatgtccggagcattataccaccctgattatgtgtaacagattattacaaaagccttgcctgatgcgccaggatagtgaacattacttgccgttttccctccaagaataactataaaggcggcggtccaacgagattgcgccccgaacaccccccagtaaatatgggatgtaaaaaaagaggtatatgtgtctactgcaaacaataaaccagcagaaagcgtgagtctgaacgctttcaaacaaccacgcgcgttctatctcattttctcgatcgagttgtgggagcgttttggttactacggcctgcaagggatcatggccgtttacctggtaaaacagctgggtatgtcggaagcggattccattactctgttctcctcctttagcgcgctggtttatggcctcgtcgccattggcggctggctgggtgataaagtgctgggtaccaagcgtgtcatcatgctgggcgctatcgtgctggcgattggctatgcgctggtggcctggtccggtcatgacgccgctatcgtctatatgggtatggcgaccatcgccgtcggtaacggcctgtttaaagccaacccgtcctccctgctttctacctgctatgacaaaaacgacccacgtctggacggtgcatttaccatgtactacatgtccatcaacatcggttcgttcttctctatgctggcaaccccgtggctggccgcacgttttggctggagcgtagcgtttgccctcagcgtggtggggatggtgatcaccattattaacttcgccttctgtcagaaatgggttaaacagtacggctctaaaccggactttgtcccggtacacatgggtaaactgctggcgaccatcgctggcgtggtggtgctggtcgctatcgccacctggctgctgcacaaccagggtatcgcacgtatggtgctgggcgtcgtcgcactgggtatcgtcgtgattttcgccaaagaaaccataggcctgaaaggcgctccgcgtcgtaaaatgatcgtcgctttcctgctgatggtagaagcgattgtcttcttcgtgttgtacagccagatgccgacctcgctgaacttcttcgccatccgtaacgtggagcactcgatcctcggtctcgcctttgaaccggaacagtatcaggcgctgaacccgttctggatcatgattggtagcccgattctggccgccatctacaacaagatgggcgaccgcctgccgatgccgcacaaatttgctatcggtatggtactgtgctctggcgcattcctcgtcctgcctttaggggcgaagttcgccagcgacgccggtatcgtctcggtcaactggctgattctgagctacgcgctgcagtctatcggtgaactgatgatttccggcctcggcctggcgatggtcgctcagctggttcctcagcgtctgatgggcttcattatgggcagctggttcctcaccacggcaggcgcggcgatcatcgccgggaaaatcgctaacctgatggcagtcccggagaatgtcaccgatccgctggtgtcgctggaagtgtacggtcacgtattcctgcagattggtatcgtcaccgcggttatcgccgccctgatgctgctgaccgcgccgaaactgaatcgtatgactcaggacgacagcgcggacattaaagcacgcgaaaccgcggctgcctgacgccgcagggaaaactaattatttttaagccgctaacgttagtttagcggctttttttttacccctggcaggactaacatacagaaaactgcagccacgaggagtcacgcatgaaactgttctacaaacccggcgcctgttcccttgcctcgcatattgccctgcgcgaaagcggtctggattttaccctgcagagcgtggatctggcccaaaaacggctggaaaacggggaagactatctgctgatcaacccgaaaggtcaggtgccggcgctgctgctggatgatgatatcctgctcactgagggcgtagccatcatgcagtacatcgcagaccaggtgccggatcgtcatctgctggcgccggtgggctcgattgcgcgctatcagactctcgaatggctgaactatgtggccaccgagctgcataaaagctttaccccgctgttccgcccggataccccggaggactataagcctgtcgcgcgggggctgcttgagaaaaagctgcaatacgttgatgcagcgctggcagacaaacagtggctgaccggccatcgcttcaccattgccgatggttatctgtttacggtgctgcgctgggcctatgctataaaattggatatggctgcctatggtcatatcggcagctggatgacgcaggtggcagcgcgtccggcggtggctgccgcactggcggctgaaggcttaaaataaggcctgaacctgcccggcggaccgtcggcaggccctgggagttacagccgggtggcgctgaagcagtgctccggtacggcgatgcgatcctgcgccgctactacctgcagttcgtattcctgcatatttttggtggcgagcataatctcgtacaccgcggcggtgacgtgttccagcgcatcgcgcagacttgccccctgcagcaatttaaccaacagcaaaccgctggttacatcgccgacgcccaccggctgacgcaggccgaaatccaccagcggccgactaatatgccaggcttcttcggccgtcaccagcagcatctcaaaacgatccatactcagacccgcacgggcaagatgcttaactaataccacttccggcccctgggcaatcagctcccgcgcggcggccactgcttcgctgacgctggcgaccggatgaccgcacaggatctccagctcaaccagattcggggcaataatatcgctggccggcagcgcatagcgcacgtggaactccgccacgcccggcgcaacgatgcagcccttctccgggtgacccatcaccggatcgcaaaaatatttcgccgccggattggccgccttaacctgacgcacgataccgaggatatgctctccctgctcagcggagccaagatagccgctcagtaccgcatcgcaggtctgcagcttgtcgatatcggcaatcccctgaacgatctccgtcaggtgtgaaggcggcatgacgcagccggtccatttgccgtactgcgtatggttagagaactgtacggtattcaggggccagacattggcgcccagacggcgcatcggaaattcggcggcactgttgccggcatggccaaacacaacgtgagactgaatggcgaggatgttcttcattttcttaccacaaccctaaaaagaaaaagggcgtggtttcccacgccctggcagtatttttttatttccagcagaccaggcagtaatttttcttaccgcgacgcagcaaggtgtagcggccaaacaggcgatcgctgtcactgaatacatattccgggtcggcctgtttttcgccgttgatggtcaccgcgttagaggcaacggttttacgcgcctgaccgcgggacggctgcagctcggaatcaaccagcgcctgcagcagatcggcgcctttttccatttcgatcatcggcacgccatcctgggccagctgttcgaagtctgcttcgctcaggtcgctcaggttaccgttgaacaggctttcggtaatgcgcttcgccgcttccaggccttcttcgccgtgaacaaggcgcgtcacctgctctgccagcacgtactgggcgcgcggcgctttaccgctgtttttgtcttcttcttccagggcattgatctccgcaatgtccataaaggtgaagaatttgaggaagcgatagacatcagcatccgcggtgttgatccagaactggtagaatttgtacggactggttttcttcggatccagccacacggcgccgccttcggttttaccgaatttggtgccgtccgctttggtgatcagcggtacggtcaggccaaacacctggttctgatgcagacgacgggtcagatcgatgccggaggtgatgttgccccactggtcagaaccgccaatctgcagcgccacgccgtgcagcttattcaggcaggcaaagtcgtaaccctgcagcagattgtaagagaactcggtaaaggagataccctgatcgtcacgattcagacgctgcttcaccgcttctttgttgatcatctggttaacagagaagtgtttaccgatatcgcgcaggaaggtcagcacgttcatgctgccaaaccagtcatagttattcgccgcgatcgccgagttgtcgccgcagtcaaaatcaaggaacggagccacctgtttgcggattttatccacccactcctgcacggtatcttcggtgtttagtttacgctcagcggctttgaagcttgggtcgccaatcagaccggttgcgccgcccaccagcgccacaggtttatgacctgcctgctggaagcgtttcaggcataacaatggaacaagatgccccaaatgcaagctgtcagcggtaggatcgaagccgcaatagagcgcgatcgggccttgcgccagtcgctctgctaacgcttcctcgtccgtcacctgggctaccagcccccgctcttgcaattgtttaatcaagttactgcttgccatcaaattctccatgtataaacgactgcacctctgccggtacacgacttttcgccagatgcgaaaagtacatagaataaagcgccggccctttcagcgccagcgcttcgataactaatttcggcgtttacggcgccagacggtctattttccaggcgccgctatcgcgctggtataaaaagcgatcgtgcagacggtgttctcccccctgccagaactccatctgctcaatgctgacgcggaatccgccccagaagctcggcaacggcacttcaccctgctggaacttctgcttcagctcgaggaatttgctttcgaggatgccgcgggctgagatccggctcgactgcttcgagacccaggcgccaatctggctgtcgcgcggacggctgtggaaatatttgaccacttccagcgtcgacagacgctccgctttgccgattaccatcacctggcgctccagcatatgccacgggaaaagcaggctgacctgcgggttgttttcaatttgatgcgctttgcggctgccaaggttggtataaaacaccaaccctttttcgtcgtagtgcttcagcagcacaatgcgctggtagggctggccgcgctcatcgacggtggcgaccaccatggccgttgggtcggcaagtttcgcatcgcaggcctgacgcagccagcgttcaaacagcggcaggggttcagcaggaagatcgtggcgacgcaaaccgccacgggtgtattcacggcgcaaatgcgcaatttgctggagttcgtcgttatcagacatggccattgaggatgtagtcataaggtggcgttattgtgcgccccccggacagaaatctcaacgtttggccgtctgcagctgacagttatcaaggacgatgcggtcgcgcttatagacggtggcggtatcgccttttgaccagaacacatagacgccgtcggtgtagcgcgccccggaagccgacagcccctcagacaggttcagttgctgattatcatagataaaactgacctgctggcgtgcgttattgcgatggaccgtcaatggtttctggtcgcattgatactccagcgtgtccgtctgcatccgctcgacaaactggttgtagtagctacagcccgccagcataaaaggtacaactgcgataagaatttttttcattcgtttgccttcgactttcccggtcacggcgggcactccgccctccgcttaacttgtccagtttaccggtcgcgtcgtatttaagatttcagttaactccgattctgcggcgggttagccggaaaaatggcgcccagcaccgaggcttcgctggcgccggtcacggagggcagattgcccggcagaccagccagcgttcgccaggccagccaggcaaaggccagcgcttccatatcatcgccgctgatccccgcctcatcggtggtggagacctcggttcccggcagcagcgccgccaggcgcgccattaacaaggggttacgcgcgccgccgccgcacactaacaaacgctcgcagccgccgcttaacaatacctgctcactgatggtgacggcggtcaattccgcaagcgtagcctgaacatcctccccgcgtagccccggatagcgggccatatgctgctccagccagccgtaattgaaatattcccgaccggtgcttttcggcgccggcaaggcaaaccacggatcgctcagcatgtcctgcagcagcggcagcagcactttaccttcgctagcccattgggcgtccttgtcgtacggtttgcccttctggcgccagatccaggcgtccagcaacatatttcccggcccggtatcatagccgcgcaccggctgacctggcgccagcagcgacacattagcgatcccgccgatattgagcaccatacgtcgctcaacggggtgggccagcagcgcatgatgaaaagccggcaccagcggcgccccctgcccgcctagcgccatatcccggcgacgaaaatcccccactacggttatcccggtgtgggcggcgatctggttgttatcaccaatttgcagggtatgcggagcctctccctgcggttcatgccatacggtctgtccatggcagccgatggcgatgacgtcggtgggtttgagactttcctggcgcatcagcgccagtacggcatcggcaaacagccgtcccagacgggtgtccagacgacctagctgcgaaagggtcagcgactgcccctggcaaatcgccagaatctcttcttttatcgcgtgtggaatgggccaggtgagactagcctgctgcgccaccatgttttcagtaatggtggccaaaacgacatcgataccatccaggctggtaccagacataacgccaataaagcgacccgatctcatacgttttccttcattccatgacccttgtatgccctcactccatcataaagtgtcggctaatgctatgttgtactaatactttttaacaatagagcgacaaatcagagaacatcgtaaagaaccggcgtttagttgaggttgaagcaccagtgtttattattttttgtatagtccagggagaacctatgcccgccgacgactaaatgccatataattaaccgtatggacgttcaattgaacaccttcggtgaacaggagattcataaatgattttacgtgttttggctgtatcgatgattggttttacgctcgcaggctgcgtgagcagcagcggcctgtccggcgacgtttattccgcatctgaagccaaacaggtgcagagcgtgacttacggtactatcgtgcatacgcgcgccgtacagatccagagcggcgacgatagcaatgccatcggggccattggcggtgcggtactgggcgggttccttggaaacaccatcggcggcggtaccggacgctctctggctacggcggcaggtgcggtcgcgggcggcgtagccggtcagggcgttcagggcgcgatgaataaaacgcagggcgttgaactggaaatccgtaaggacgatggcaataccattatggtagtgcagaaacagggcagcactccgttctccgttggtcagcgcgtggccattgccggcagcggcagccaggtcaccgtctctccgcgataatttcccttacgatgcggccggttgcgccgcatcgtatttttcagccacgtttatttcgccgtaataaattcgtagtaaccatcagacatctttattttaatattccatgaatcattgcgcctgcgcaatatcttatctgcccgcccctattaccctcaagaacgtaaattagccctggtgactcatcgtcgctgccgttgccttttatgtggaatattgcctatgcccgaacatgtgcatcatatcgttaaacgtctaatcctttatatttgcatttgtttactggccgggattggcatttccgggatgactgctttttttcataccagcttcagtagtacttcctcaatattatttccgctgctgaccagtttcctgatggtttttcatattaccattgcctgttttatgggcatgaaatactggagcagcaagcggcgtctgtaccttactccggtctctttcgggtttgcctgctcagcgctgctgatgcttggcacgctcagcagctatccggactggcttacctgcaatccggccccggtcgttaatcaaaatgacgccgttatctattatttcttccgcaatataatgatggctgtgttattcatgtcatctattattttgtactattttcgccagcgcatcatgcattcgtggaaagcacacgttcttacatttacagcatgtatactttttacgttgaccattattgttttatcatggctatactccagccattcgccgtggctgagcgtcaattttatcgacgatctgagccatacctttaccccgttgtggcaaagtattatcggctggctgctgatggcagtttggttcatcacgctgattttattaattagcttgagtaaactgcgtaatattttttggttcagcggcgcttttttttgcagcgcttatttgttcacgcttttccagctgctctccaccgcaggggagctggatcagacctggtaccaggcgcgttttttcgaaacgctatgcaccttgttcctgattctggtgctactggttgacgtctttatcctctatcgcgagtctaaccacaaatatgtccattcgtatcagaattcgatccgcgacccgttgacccgcctctacaaccgcagctttttctacgacactcttaaccaacagctggcgaaggtgaatgcccagcatccgctgtcggtgctcatcagcgacctcgaccatttcaaacgcatcaacgatagctacggccatgtcgcgggcgacaaagtgatccagttcgccgcctcggtgctggaaagccattcgcgggtagatgacgccgccgcacgcatcggcggtgaggaatttgctctgctgctggtcaacaccggtgaaaaagaagcgcaagcgatcgccgagcgtatccgcctggcggtcagtgccggggagagccatttaccggagcgaatgaccatcagcatgggggtgtataccacctacgacaatagcgtgacagcggaagcgtgcgttcagcgcgcggacgaagccatgtatgaagcaaagaataacggacgtaaccaggtgatcgtctggcatcagcagggagggtgaaaaaaggcccggattagcccgggccgcaaagaattaatctttagcctggagatcgaggatattttgttcaagtttacggattaagtggagcaaggtttccacttcctgcttcgagacccctgagaggatttcatcacgggtcttacctatcacctcttccatctcgttgatcagcggttcggctttttccgtcagcttgatgcgtttggcccgccgatcgcttgcgcaggtctggcgagaaatgagccctttctcctccagctgatcgagcgtacgcaccagcgacggctgttcaataccgatagctttcgccagctggatctgcgactgctcaggcggcagctggtggatgttatgcagcgtgacccagtgggtctgcgttaactccagaggtttcaggcgatggtcgattagcgcgcgccaaacgcgaactaaacgtgccagatcagaaccaagtggcgattccaatttcatctccttataattagcttgctaagttattatactgattttagaatagtgtgcagcatttgaattatcaaaacaaatgaattacttgattcaacaaaaaccaaaacaatgatttacactgttaaagagtagcacgtcctgaggttacccctgtaatggcaaaggatttttgcttgtgaaactgagtcttaacacatccggattgccgctgcaggacctggtgttcggcgcatccgtctatttccctccgctgttcaaagccgtcttgttgggtttctttatctggttgtttttacatcgccagctgcgtgactggatgtatgcgggcgacatctggcacccgctactaatggatctctccctgttcgcgctctcggtctgtctggccctggtattactcattgcctggtgatctccctgttatgaaaagattaaaatatctgtcaacgctgctggtcgcggccgtcgccctgattgccgcatggttgttatggaatttctacactcagtcaccctggacccgcgacggcaaagtgcgcgccgagcaggttgggatcacccctcaggtctccggcagtattctgcagttgaacgtaaccgataaccaacgggtcaaagccggggaagtattgtttaccatcgacgacaccccctatcgcatcgcggtgctgaacgcccaggcgcagctggcgaaagcccaggcggaggtggcgaaagcgcaggcggagcaaagcaaggccgccagcgaggctcgccgtcgccgaagcctgtcgcaaaatgccatctcggctgaagaccttgagaacgtcaataccgccctgaataccgccaccaccaccctggctgccgccagagcgggggtcggcgtaaccgaagcggcgctgaaacatgcgcagtggcagctcagccagacggttgtcaaagcgccggtggatggctgggtgaccaacctttccacccgcgtcggtgattacgctaccaccggccatccggtctttgccctggtggacagccactcgttttacgtgctgggctacttcgaagagaccaaactgcgccacattcgcatcggcgatccggcacaaattattctctatagcaatcagcagacgctaaagggccatgtcgcgagcatcggccgcgcgattgtcgaccagagcgtggaacagggaaccgggctggtggccaacatcaaaccaaatatcccctgggttcgtctcgcccaacgcgttccggtgcgaattgcctttgatacgctgccggccgatgtcaccctggtctccggcaccacctgcactgtctcaattggcgggcagtaatgaacctgcagaccctgtcgtggcgcgcactcccctgggttaaagccacccggccgcagtggcggtacgcattgcgcaacggcatcgcgatgtgtcttgcgctgagtatcgcctatgcgctggatcttgatgagccctactgggcgatgacgtccgcggcggtggtcagctttcccaccgtcggcggcgtgatcagtaaaagttttggccgcatcgcaggcagcctgctcggcgcctgcgccgccctgctgcttgccggtcatacactcaacgatccctggctgtttctgttcagtatctccggctggctggcgctctgcacctgggcctgcgccctgttcaccaacaacgtcgcttatgcctttcagctggcgggctatacctgcgccatcatcgcctttccggtgattaacatcagcgacagctacgagctgtgggtcatcgcccagtcgcgcgtctgcgaagtcatcgtcgggatcctctgcggcgggctaatgatgatgatcctgccaagcacctccgacggcagcaacctgctgacggccctgaaaaccatgcacgcccggctgctggagcacgccagcctgctgtgggtgccggagacgacggatgccattcgcaccgcccatgagagcgtgattggccagatcctgaccatgaacctgctgcgtatccaggccttctggagccactaccgtttccgtcggcagaatcctctgctgaactacctcctgcatcagcagctcagaatgaccagcgtcatctccagtctgcgacggatgctgctgaactggcctgacgcgccggcgaatactcgccaggtactggagtcgctgctcgccgagctcgccacccctcatgccgacagctatcacgttgcgcggatcctggcgccgctggcgccgcggcaggatgccgattaccggcacatcgctttctgggcgcgattgcgctatttctgtcgcatttacctggagagcagccgctggatccgccgcgttgaaaatgcctcggcgatcgccgagttcaatgtgcccgccgccccgccgttagcccgccataccgatcaggcggaggcgttgctcaacggtgtccgtaccttttgcgcgctggtggcgattggcgcatgggggatcagtacccagtggaccagctgcgcggcggccctgaccctggcctccatctgctgcgtgctctactccgtatccgcctcgccgtttcgctcgctgacattgctgatgcagactctggtcctgctgtcgctattcagtttcgtggtgaagttcggcctgatggtgcaggtaaccgacctgtggcagtttctgctgttcctgttcccgctcctgaccaccatgcagttactcaaactgcagtggcccaaatacgccggcctgtggggacagcttatcgtctttatgggctcgtttatcgccgtcaccaacccgccggtgtacgattatgcggcctttttcaatgataatttgagcaagattgtcggggtaggctttgcctggctggcctttgcggtactgagtccgggctcggacgcccgcaaagggcgacgccatatcagagcgttacggcgtcactttgtcgatcagcttagccgtcatcctcagcacagtgagcatgaatttgaatcgctggtctatcaccacgtcagtcagctcagccagagtaaggatgccctggcgcgccgctggctgttgcgttggggcgtcgcgctgctcaattgctcgcacgtcgtctggcagcttcgcgaatgggaaacccgctccgatcctctcgcccaggtgcgcgacctgtgcatcaacctgttacgcgatgtgatgagcgagcgcggcgtgcagcagcgcccgctggcctccaccctgcaggagctgcagcggatctgcgacgccctgaaccaccatcatcagccggcggcgcgggaactggccgccgcgatttggcgactgtactgcgccttgtcgcagctggaacaggccccggtggccggcacaattggcgaaggaactacttaatcaccccgcaggcaaaccgttcgccgccgccgcccagcggctgcggactgtcggccatgttatccccgcctacgtggaccatcagcgctttccctttcacctccgccagcgttttcaggcgcggagcaataatcggctggtcggctacgcccgcatcgttgaccaccagcaggggcaggtcgccaagatgcccggcccccaacggcccttcgtgtttgccggtatgctgcggatcgtaatgtccgcccgccgccccggcggccacggctttaccttctttcatcgccggctggcagctgccttcggcatgaatatgaaacccgtgcttacccggcggtagcgcccgcagagtgggggcgaactcgagtccgcggtcggtttcggtgattttgacgctgccgatggtctgaccgacgccctgggtggtcacgagattaagttgcacatcttcactaacggcctgtgcgccagcgcaaaatgcgagggataagatcgcgagaatacatcgttgcataatacctccggatggctgtctccctgttaagtgtaaaccaggaacgcctttccggaggggaaatgcccgttacggtacgtcgtacccgagcgcggctttacggatgcggaaccactgctgacgggtcatgctgagtttttcagccacaatcgccgagcgcacgcgctcgattttgcccgagccaataatcggcagcggctgcgacggcagacgcagcacccaggcataaactacctgttcgatgctgtcggcgttaagctcgtgcgccacctgcgccagctcatcgcgcagcgcctggaagccctcttcgttaaacaggcgaccaccgccaagacaagaccacgccatcggacgaatacgcagttgctgcagctgatcgagagtaccgtcgagcagcagcggctgatgcaccggtgaaatttcgacctggttggtggcgagggtaaacggcagacgtgactgcagcaaggtgaactgggcgggggtaaagttcgagacgccaaaatggcgcactttaccgctatgatgcagcgcgagaaaagcttcggctacctcgtcggcgtccatcagtgggtccggccggtggatcagcagcaagtcgagatggtccgtcgccagattacgcagcgattgctcggcgctgagcacgatgtgatcgcggtcggtaatgtagtggccaatggtgttctcagcgcgcgcccgggtggcgataccgcatttgctgacgatttccatccggctacgcagatgcggcgctcgcttcagcgcttcgccaaaggcagcctcacactgataatcgccatagatatcggcgtgatcgacggtggttacgcctaaatcgagatgctgctcaataaagctgaccagctcgccaggcgacattttccagtccatcagacgccagtagcccatcacaaaacgtgaaaattccggcccctggggagccatagcaatacgctgaaccataaccgcttcctcaataaaaaagtgctctgagtatacgtaatttttggcttaaaacagtgagggttgctgcggttcttccgccggctccggcctgttcgcgcgtattttgcgcagcagccgttggcggcaaagacgcaaaacctcctgtttctgcgcatcgctcatcgtttgccagttaaaacgttcctcacggctgcggaaacagccgcgacagtagccgcgctcatcggtctgacatattccccggcacgggctctgcaccgggaaaaattctaactgctctgccaccacacgcctcctgtcccctcgtctcctttcattgaagacgtttccccgcgccgacgcaaattttgttcactacgtgctgcgtcagctaacatttttccgccgacgcttgcattagaccaatcggtctactacagtgtgcagcatgaacagacacagcgattgcgatacccgagaacatatcctggccaccggcgagcagctttgcatgcatcgcggttttaccggaatgggcttgagcgaacttctgaagacggcggaggtgcccaagggctccttctaccactactttcgctctaaggaagccttcggcgtcgcgctgcttgaacatcactacaccggatatctgcagcgcctggtcgaccacttcgatcatggcgacggtaactatcgcgatcgcctgctggcctactatcagcacacgctgaatcagttctgccagcaggggattattagcgggtgtcttactgtcaagctatccgcggaggtttgcgatctgtcggaagatatgcgcgccgccatggatcgcggagccagccagattatcgccctgctgggcgacgcgctggagaaaggacgtcaggaaggcagtctcgcatttgacggcgcggccatgaccctgtcgcaggtgctgtattccctgtggctcggggccaacctgcaggccaaaattacgcgtagcgcaacgccgctggaaagcgcccttgcccacgccaaacagattattgcggcgcctgcggtataacaggcgtttttatttcatcagttactagacgaccggtctactcaggagtcactatgtcggaagcaaaattattcagcccactgaaagtcggtgcggtcaccgtccctaatcgcgtatttatggcgccgttgacgcgtctgcgcagcattgagccgggcgatatccctactccgctgatgggcgaatactaccgccagcgcgccagttccgggctgatcatcaccgaagcgacgcagatctccgcgcaggccaaaggctacgccggcgcgcctgggctgcacagcccggagcagattgccgcctggcagaaaattaccgccggcgttcatgccgaaaacggtcatatcgccgtccagctgtggcacaccgggcgtatttcccatagcagcctgcagcctggcggcgccgccccggtagcgccttccgcgctgagcgcgggcacccgtacctcactgcgtgacgaaaacggccacgccattcgcgtcgacacctcaatgccccgcgccctggaaaccgcagagatcccagggatcgtcaacgatttccgtcaggcggtcggcaatgcccgtgacgccggcttcgatctggttgagctgcactcagcccacggctatctgctgcaccaattcctctcgccatcggcgaaccagcgtaccgatcagtacggcggcagcgtggagaaccgtgcccgtctggtgctggaagtggttgacgccgtgagtcaagagtggagcgccgagcgcattggcatccgcgtgtcgccgattggcagcttccagaatgtggataatggcccgaacgaagaagaagacgcgctgtatctgattagcgagctggcgaaacgcggtatcgcctatctgcacatgtccgagccggactgggcgggcggcaaaccttacagtgaagctttccgtcagaaagtccgcgaccgcttcccgggggtgatcattggcgctggcgcttacacagtagaaaaagccaacgatcttatcaataaagggctgattgatgccgtggcctttggccgcgattacatcgccaacccggatctggtggctcgcctgcagaaaaaagcgccgcttaacccgcaacgcccggaatccttctacggcggcggcgcggaaggctacaccgattacccgactctgtaatccctccattgatagcggcgacgtatcgccgctatactcaacgttctgatctatcaaataaactgcataggggacattatgcgcttactccacaccatgctgcgcgttggcgacctgcaacgttctatcgacttctataccaacgtgttgggcatgaagctgctgcgcaccagcgaaaacccggagtacaagtactccctcgcctttgtcggctacggcgaagagagcgaaaccgcggtgatcgaactgacctacaactggggcgtggacagctatgagctgggcaccgcctacggccatatcgcgctgagcgtcgataacgccgccgaagcctgcgaacggatccgtcagaacgggggcaacgtcacccgtgaagccgggccggtaaaaggcggcaccaccgtcatcgccttcgtggaagatccggacggttacaaaatcgagctcattgaagagaaagatgccggcaaaggtctgggcaactaacgcttccccacgctggcatatttaatgccatggctcgcccgggcgctacggcgcccgttgttttcacccctgcctgctgcaagccgcggcaaaatttgccataatgcgcgctacttttttccagctaagagaatctgatgtccgagaacgctcaactgaatggtctgtgcgaccgtttccgcggtttttatccggtggtgatcgatgttgaaaccgcaggatttaacgccaaaaccgacgccctgctggagatcgccgccattacgttgaagatggatgagcacggctggctgatgcccgatgaaacgctgcatttccatgttgaacctttcgagggcgccaatctgcagcccgaagcgctggcttttaacgggattaacccgcatgacccgcagcgcggggccgtcagcgaatacgatgccctgcatgccatcttcaaaatggtgcgcaaagggatgaaagagagcgactgcagccgggcaatcatggtggcgcacaatgccacctttgaccacagcttcaccatgaccgccgccgaacgcgcgggacttaaacgcaaccctttccatccgtttgttaccttcgacaccgccgcgctaagcgggctggcgctgggccagacggtgctgtcgaaagcctgtattgccgcgggtatgccgttcgacggcgcgcaggctcactccgccctgtatgataccgagcagacggcgcagctgttttgcgagatcgtgaaccgctggaagcgtctgggcggctggccgctgcccgtagccaccccggagtgataaaaaaagcgacttccaggaagtcgcttttttactgatggcgggaattactccgcttttggctcgtcggtatggtactttgccgccgtctctttgatcagctgctgcagttcaccgcgctggtacatttcgatgacgatatcgcagccgcccaccagttcaccgtctacccacagctgcgggaaagtcggccagttggcgtatttaggcagctcggcgcggatatccgggttctgcaggatatcaacgtaagcaaaacgttcgccgcaggcggacagcgcctgaacggcctgggcagagaaaccgcagcttggcagcttcggcgaccctttcatgtacaacaggatcgggttttcagcgatttggcgttggatcttttctaaagtcgagctcattgtcgtgcttccttaaacttctttctacggcagtaacttgtcattgtagcgtcctgtaggcaggacggataataacatttttttcactattcatattttatcttctgttgcgcgaagttgccttaaaaatatcattttgcggtcacaggcgggcgctcattgcgcattttctgtgcgaggcggtcaatgtctgacgcgttttcttgcaatcgttaaccaatcgacatttttgatacaaaagaatattaactttccggctttttatgctttagaatcattccggtttgtcattcatcgtcaggcatttgtacatgtctgtaattaatcaggggattgctcagtggcgcggctaaacaaaatcgcgatatcgctctgtgcattactgttcacgtctatctcattcacgccactggctcaggcatcagggcatacgcacgcctccgcttcgccaaaagcgttgcccgcgaaaagtggctcagagcgcaagaaaaaagcaaccagtcaaaaaactaaaaccaccgctaaaaccaccagtaaaaagtcctcgcgcacccggctccctacccgcactaccgcagcaagccaaaccgcacttcatcgtcaggccgccggcgcgacgaaaaaatgcgtgctgcgtaaaggttataaaaagcagtgcgcgaaaacggtcgccgccagcgccgagccgaccctggcgctaaacagcgtcaaaagcaaatgcgtggtgcgcaagggctataaaaaacgctgtaagcccgaggccagcgaagcgaatttaacgatcgccgacgcccacaaggtccgggtgcaaaaagcgcaaagtaccgcgatgaataaactgatgggccagttgggtaaaccctatcgctggggcggcacctcgccgcgcaccgggtttgactgcagcgggctggtctattacgcctataaggacctggtcaagatccacatcccgcgtacggccaacgaaatgtaccacctgcgcgatgcgcgtccggtggatcgtgatgaactgcagagcggcgatttagtcttcttccgcacccgcggacggggcgctgccgaccatgtcggcgtctacgtcggcaacggaaaattcattcagtcgccgcgcacaggtcgtgatattcaaatcacctccctgagcgaggattactgggttcgccattatgtcggcgctcgtcgcgtcatgacgccgaaaaccattcgctgatcccggtctgccgctgcggcggcagaccgcctctcctgctcgatctccatccccacccgcaagggatattgcagattgctctctttgcccggcgtatcacgacgatagcgggtcggcgacatgccaaagtgacggtgaaaggtccggcagaaagcggcttgtccctcgtatcccaggcactgagaaatactctgtatcgacgcctgcgtctgcgttaaatagattgtcgcaatcgtcatctttcgtcggctgacgtagctcgccagcgtgcagcccgttaccatggcgaattgtcgctggaagtaccagtgtgagtagccggactttttcgcaatcgcgctcaccgacagggtgtcgaaaatatgtgcttcgatccagtcaacaatcccctgcaccaccgggatcattttcgcgctcaccacctcatctgtttttgccatcgtcgtcatcctggggaaattactgctggcggctatatttgtcatacaaattaaaaaatagacaatgaattattggcatagcgacgattgcctgagcgcatatttttattaatcgtttgatattaaagttttattttttgtccagcgcattgcttgacagcggcgaagcagagtagttaatcgccatgcgagttcgcaaatccgcagagggcatctccttatacatggttgcaacaattttggcggcttatcacccactcctgcagaaaacggttaagccttcaccacatgcaccggtgataatagcctttatcgttgtaaggcttttcactgcttgcggcaaatgttaacattctcaatacaataacacgcccgggacgcgacagcgtcgggcggtcagaacacgattcaggtgaaaacctcatcctgtcaatgtgagataaaacaaaaagttataaggagagtagcaatgtcgtttgaattacctgcattaccatatgcaaaagacgccctggcgccgcacatttccgcagaaaccctggaatatcactacggtaaacaccaccaggcgtatgtcactaacctcaacaacctgatcaaaggcactacgttcgaaggcaagtccctcgaagagatcgtccgcacgtctgaaggcggcgtgttcaacaacgcagcgcaggtctggaaccacaccttctactggaactgcctggcgcctaacgccggcggcgaaccggaaggcgaactggcggccgcaatcgccaaatctttcggcagcttcgcggattttaaagccaaatttaccgatgccgcggcgaaaaatttcggcgctggctggacctggctggtcaaaaatgccgacggcagcctggctatcgtctccaccagcaacgccggtaccccgctgaccaccgacgcgaagccgctgctgaccgttgacgtttgggaacacgcctactacatcgactatcgcaacgcccgtccaagctacctggaccacttctgggcgctggttaactggaagtttgttgcggctaacctcgcggcataaacgacaaaccgcagcggggtctccccggctgcggttttttttgcccttgcccagccgatgattactggctggcgaaagcctcttccggctgcgctcgcccgctaaaccagaccagcagcagcgccagaccagcgataatcgcgcccatcaccggcacaaacgcatatcccagtccgccagagatcaccgccccaccggcggcggcgcccagcgcgttgccgaggttgaacgcgccgatattcaccgaagaagagagccccggcgcctcatgcgctacgcgcataacccgcatctgcagcggcggaaccaccgcaaaggttgctgcgccccagacaatcatgctgatggccgccccggcctgggattgcgccagcagcgggatcgccagcatgatcgccatcagcagcagcagaaagcccttcagcgtgccggagaccgaccggtcagcaaatttgccgcccagatagttgcctagcgaaaaaccgacgccaatcagcaccagcatcgcggttataaacagcgatgaagcgtgggtcagcgtattgagcactggcgaaatgtaggtatacagcgtaaacatcgccccggcgcccagcacggtggtcagcaacgcggagagcacctgcgggcgcagcaggacagaaagctcttttttgacatcaggacgttcccccgcgctgcccttcggcagggagaaccacaggctaaccatcgccagcaggcctaatcccgcagtagcaaggaaggacatccgccaaccgatggtttcgccaagccaggtggccgccggcacgccgccaatgttggcgatggtcaggcccataaacatagtggctaccgcgctggcctgcttatgctttggcacgacgctggccgccaccaccgatcccaggccgaaaaaagcgccgtggttgaggctggtaataatccgcgacagcagcagcgtggtgtaatccggcgcgatggatgacaacaggttgccgacggtgaagatccccatcagaaaaatcagcgcattgcgccgtgcgcgatgcgacaacagcagcgtcatcagcggtgcgccgaccatgacgccgatggcatacgcactgatcagcattcccgctaccggtatcgagacgtccacacctttcgcaatcaccggcagcaatcccatcggggagaactcggtggtaccgatgccaaaggcgccgatcgccagcgcaagtaaaggaaagttgattttcattcaatgactccatcagaccgtcagagaggacggcgtaacatcagaagtcaaaagcatgacatcaatcacaaaaaaacaaaagtgaacgaaatgacaaaagatttttgcagaattgataataatggcgggatatggggaggaagcggcctcctccctcagcgaaacattagtgcagtatggcggtcaggctgaaagcgacaatcacgccgagagcaataatcgtggtgatcagcgaaaactttaaattggtatccatcatttttccctcttgttatccccacaccaaaagtgagcttgctcatttttgcacaaaaaatcgcaaaaatcttccgggatttagggcgatgcacatttttgctcttccactttgccccaagatcggacaaaatcccacgctaatttaaaagcgtatcggccattgaccccttcctgtcgttctgtgtcgttttcccgacgtgatgcaatgttgaaaattgtattcagggtgtgtgtaggcaaacgtttacgtatcgatgatcaggcgatcaggtcaaggcatggagtgagatgtaatggcaactattaaagatgtagcgaaacgcgcaaacgtttccactacaactgtgtcacatgtaattaacaaaacccgtttcgttgccgaagagacgcgtaatgcggtatgggcggcgatcaaagagctgcactactcgccgagcgccgtggcgcgcagcctgaaagtcaatcacaccaaatcgattggcctgctggcgaccagtagcgaagccgcctatttcgctgaaattattgagtccgttgaaaagagctgcttccagaagggctatactctgatcctcggtaacgcgtggaacgatctggaaaaacagcgcgcctatctgtcgatgatggcgcaaaagcgcgtagacggtctgctggtgatgtgttccgagtatccggattcggtattgagcatgctggaagagtaccgccatatcccgatggtggtgatggactggggcgaggcgaaagccgacttcaccgatgcggtgatcgataacgccttccagggcggctatatcgccggacgctacctgattgaacgcggccatcgcgaaatcggcgtgatcccgggtccgctggaacgcaacaccggcgcggggcgactggccggcttcatgcaggcgatgaaagaggcgcatatcagcgtgccggaaaactggattgtgcagggcgacttcgagccggagtccggctaccgcgcaatgcagcagatcctaaaccagcagcaccgcccgacggcggtcttctgcggcggcgatatcatggcgatgggcgctatctgcgcggcggatgaaatgggactgcgggtgccgcaggacatttcgctgatcggttatgataatgtgcgcaacgcccgctatttcagcccggcgttaaccaccattcatcagccgaaagattccctgggcgaggccgcatttaacatgctgttggatcgtatcgtcaacaagcgtgaagagtcgcagtctatcgaagtgcacccccgtctggttgagcgccgctcggtagcggatggcccgtttgtcgattatcgtcgttaaggcatctggcgggcgcggatctctccggcgcccgcagccactcccgattcagcgtgtcgctgtcccccagatagtcaagcatccagttcagcgccggtgaggcatcgttctgctgccacgtcaggcagcaggcggcatccgggaacggattttccagcgccagcgcagtccactcgccgcgatctatccatggacgggcgaaatggctcggcaccatgccgacgcagagtcctgccgacaaacaggttgctgatgattcccagtcagggacgactaccctcttctggttatccagcaaccatgttgtccgtttaggcaacgagcgcgaggtatcctcccgcaccagcgacggccagttacgcaggacgtcgtcgctcaggggtccctccatctttgccagcggatgatcgctcgccaccacgcagtcccagctcagcatccccatatcgcggaacgcatagcgaccgccgaccggaatagatcgcgttgcgccaatcgccagctcaacgcggccgtcggccagcgcatcccatacaccattgaatacttcctgaaagacgatcagttcgacgtcgggaaaatggcgatagaagtcgacgatcatctgacgcatccgcgccggtttcacaatatcatccaccgcgatcgacaactgtccgcgccagccgttcgcaatttgctgacactgctggcgggtgatctgcatttttttgataacagagcgcccttcctgtaaaaaccagaccccggcgggggtcaactccacatcacgatggcgacgctcaaataagggaacggcgagccactcttcgagctgacgcacggtatagctgaccgcggaaggcacccggtgaagctcctgcgcggccgcgctgaagctgccgttacgggcgacggcatcaaccacttccagagagtattcagaccacattttctgcctgcaaaatttttgaatgcatgtgacaaatattagcgtttcacaagccacaatgcactccctacactctgcggcatcgtacctgtacaccaactatgagaacgttatgtcacaacccgggaaaggatttttagtctggctggccggcctgagcgtgctgggctttctggccaccgatatgtacctgccggcgtttgccgccatgcagcaggatctcaacacctccgccgcctccattagcgccagcctgagcctgttcctcgccggcttcgcgctgggccagctgttctggggaccgctgtcggaccgctatggacgtaaaccggtgctgctgagcggcctggcgattttcgcggccggctgtctggggatgctgtgggtgcacaacgccaccctgatgctggcgctgcgctttctgcaggcgattggcgtctgtgccgcggccgttacctggcaggcgatggtcgccgattactatcctgcccagcgcacgaaccgcatcttcgccaccattatgccgctggtaggactgtcgccggcgctggccccgctgctgggcagctggctgctggtgcacttcgagtggcaagccatcttcgccaccctgttcgccatcactctgctgctgatgctgcctgccctgcgcctgaaggcagccgcgaagtcagtagtagtgacgcagcaaaagatcacctttctcgcgctgctgcgctcccgggaatacagcggcaacgtcctgatctacgccgcctgttccgccagcttcttcgcctggcttaccggttcaccttttatcctgcatgaaatgggctatggcccaaccgctatcggcctgagctatattccgcagaccatcgcctttctggtgggaggctatggctgtcgcgcgctgctgcagaaatggtccggtcaacagatgctgccgtggctgctggtgatttttgccgtcagcgtagccgccacctggctggtgggcctgcaaacccatgcctcgctggtggcgttaatgatcccgttctgcatgatggcggtggtcaacggcgggatctaccccatcgtggttgctcaggcgctgaagccttttccgcaggcgaccggccgcgcggcggcgctgcaaaataccctgcagcttggcctgtgcttcctgaccagtctgctggtatccgcgctgatcgccacgccgctgctgaccaccaccagcgtaatgctggtttcgattggcttagccggaataggctatcgcctgcagcagacgccggagctgacaccccactcttcccacgcgtaatgcccgtcgccagggcccggaccagtcgttagcatgctaagaaatttttattgaaagccagtacttagcgtcctatactggatccgggttcacataaatagaaaatagttacagattaacggatgcaggatgcctccgtttcaccatggaaggcctttcggcaagggttatctcccttcctctgtttacgtcggatagcgacttcacggattatccgtgagatttctcacaaagccaaaaaagcgtctacgctgttttaaggttctgatcacttgggcgtgatggagaagctatgagttcatcgtgtatagaagaagtaagtgtaccaaatgatgactggtaccggattgcagctgaattattaggccgtgcgggaattgaaatcaatggctccgcgccgtccgacctgcgggttaaaaatcctctcttttttaaacgggttttgcaggaaggttcgctgggtttaggcgaaagctatatggacggctggtgggaatgcgagcgtctggatatattcttccacaaggtgttacgcgccgggttggaaaagcagctcccacaccatttcaaagacacactccgcatcgcaggcgctcgtctgtttaatctacaaagtaaaaaacgtgcctggattgtcggtaaagagcactacgacctcggcaacgatctattcagccggatgcttgatccctatatgcaatattcctgcggttactggaaagaggcgcagagcctcgaggccgcccagcaggctaagctggatctcatctgccgcaaactggagctggagccaggcatgcgggtactggatattggctgtggatggggcggtctcgccgaatatatggcgcgaaattatcaggtcagcgtcgtgggtgtaaccatctccgccgagcaacaaaaaatggcccaggcgcgctgcgccgatctcgatgtagagattcgtctccaggattatcgcgatctgcacgacagctttgaccgcatcgtctccgttggcatgtttgagcacgtggggccgaaaaattacgccacctactttgaggttgccgaccgtaatttgaaacccaacggccgctttttactgcacaccattggttccaaggtcaccgaccataacgttgacccgtggatcgataaatatatcttcccgaacggctgcctgccttccgtgcgtcacattgccgaagccagcgagaagcattttgtgatggaagactggcacaacttcggcgctgattacgacacgaccctgatggcctggtatgagcgtttcctcgccagctggccggaaattgccgataactattctgagcgtttcaaacgcatgtttacctattatctgaacgcctgcgccggcgccttccgcgcccgcgacattcagctctggcaggtggtgttctcgcgcggtattgaacatggactgcgcgtcgcccgttaaataacactcccccgcttatcggcgggggattttttttcaggcttcattgaccttagccgccatctctttcgcggccagcacgcgttcgaccgtatcgacaaccgcctgggtctgcggatcaatctcaatattgacgcgatcgcccagtttttttgctcccagggtggtccgctgcagcgtctccggaataagatgcacgcagaaacgggtcgccgtcacctcacccaccgtcagactaatgccgtcaataccgatgaatcctttatagaggatgtatttcatcagcgttggatcctgcactttaaaccagatctgacggttattttcggaagtcagaatcttcacgatttccgcggtggtcataatgtggccggacattaaatgcccgccgatttcatcactaaatttcgccgctcgctcgacgttcacttcatcgccgacctgaatatcgccaagattggtaatccgcagcgtctctttcatcagatcgaagctgatgcgcgcgccgttgatttcggtcaccgtcaggcagcagccgttgttggctaccgaggcgccggtttccagcccctccagcatatgtgccggtaactcaaccacgtgagtgcgaaaattgggtttatcatcaatggagaccactttcgcggttccctgaacaataccagtaaacatgtttggctcctgttgaaaatcatgacggtatcattaccgctttcgctatcgggaacaataacaggagggcaaagcggttgccagcgcgcttcgtgcctcgactcttttttcactggcttaatagccaatcctcgctacaatagactggaaattcctcatttttatccccttgctgccagttacggcggcttttttagtctcaaaataacaacaattcgaaggtgttcacgtgcagaagtatttcgttgaagcgcgtcagttattagctctggctatacccgtcatccttgcgcaggtggcgcagacggcgatgggttttgtcgataccgtaatggcgggtggctacagcgccacggatatggccgccgtggccatcgggacctccatctggctgccggcgatcctcttcggccacggccttctgctggcgctgaccccggtggtggcgcagcttaacggatccgggcggcgagagcgtatcgcgccgcaggtgcgtcagggcttctggctggccggctttgtctcggtgctgatcatggtcgtgctgtggaacgccggatacatcatcagctccatgcataacatcgatccgctgttggcagagaaggcggttggctacctgcgcgcgctgctgtggggcgctccgggctatctgttcttccaggtcgcccgtaaccagtgtgaagggctggcaaaaaccaagcccgggatggtcatgggctttattggattactggtcaacattccggtgaactatatttttatctatggtcatttcggcatgcccgagctgggcggcgtcggctgcggtgtggcgacggcctccgtttactgggtgatgttcgccagcatgctgtggtgggtgcgccgggcgcgtacgatgcgcgatatccgctgcgccgagcgcttcagcggccctgattttgccgtcctgttacggctggtgcagctggggctgcccattgctctggcgctgttctttgaagtcactctgtttgccgtcgtcgcgctgctggtctccccgctcgggatcattgacgtcgctggtcaccagatcgcgcttaatttcagctcgctgatgttcgttctgccgctgtcgctggcggcggcggtcaccattcgcgtcggcttccgccttggccagggctcaacgatcgatgcccaggtttcggcccgcaccggcgtgggcgtgggggtctgcctggcggtatttaccgctatctttaccgtcctgatgcgtaagcagattgcgttgctgtataacgataatcccgaggtggtgacgctggcctcgcacctgatgctgctggcggctatctatcagatctccgactctattcaggtgatcggcagcggcattctgcgcggctataaagatacgcggtctatcttttttattacctttaccgcgtactgggtgctgggtttgccaagcggctatctgctggcgctgaccgatatgattgtgccccgcatgggacctgccggtttctggtgcggatttatcatcggtctgacctccgccgccatcatgatgatgctgcggatgcgttttctgcagcgccagccttccagcatcatcttacagcgcgctgcgcgctaacttgtctaagcccgccgctccggcgggctttttcgttcttcgctataacggcgcgttgtacattccgttactccctgacaccaaagactcactgatagcctcccggcaggcgcttatagtgttgccaacagccccgcagtggggttactcaagaaaccaagtcgaggatttcagaatgaaaaaagtattagctctggtcgttgccgctgctatgggtctgtcatcagttgctttcgctgccgatgcggcaagcaccaccccgagtgcagcagccagccatactaccgttcaccataagaaacatcacaaagcggccgcgaaaccggcagccgagcagaaagcgcaggcggcgaagaaacaccacaaagctgctgcaaaaccggctgctgagcaaaaagcccaggcggcgaagaaacaccataaaacgacgcaccacgcagctaaaccggcggttaaaccggcggcataatggtcagggcgttaaggtgataaaccggcgctgaacagcgccggttttttttcaggaggacatcatgctgcaacgctatcgcttcgaattgctgctgttactgctcatcgtctgcgcgctgtttaccctgcgcttgatgtttaaatagctggctgctgaacccatttacgggccggcggcgtatagtcgcgaaaaccggcgataatctcgtctgccgaggtagcgaacggcagcatctccgcgtagcgcgggtgcataaacccttcccgtaccatgttatcgaccatcgcctgaagcggatcgtaataccccttaatattcaggaacgcgcacggtttctcatggatccccagctgcgcccaggtccattgttcgaaaatctcctcgagcgtccccgccccgcccggcagggcaataaagccatccgccagcgccgccattttggttttccgctcgtgcatatcctcgaccacatgcagctccgtcaagccgcggtgggcaatttcccgctccaccaggccgcgcggcatcacgccgatcaccacgccaccggcctccagcgccgcatcggcgaccgcccccatcagaccaactttgccgccgccatagacaagcgccaacccctgctgcgccagcgtacgtccaaccagacgggcggtttcgaggtacagcggatgttcgccagctgaagaaccgcagaaaataccaatcgatttcatcttcgttatgactccttctcttctggtggccgataatttaacacatcggcaacccttccgcgcaggtttggactggctgaaaaataagacccgtgatgctcgctggcgaagaaatatccttgtggttcagtaaaatatatccggaatgagtaaaagttccgcaatcgcatgcaatgtgcaagaaaagtgacgtttacctcttgccacatcccctccctgccgctaatatgcgtccccgttgtcaccacaacattgcgttcgtagctcagttggttagagcaccaccttgacatggtgggggtcgttggttcgagtccaatcgaacgcaccataatgcgtttatagctcagttggttagagcaccaccttgacatggtgggggtcgttggttcgagtccaattaaacgcaccataatgcgtctgtagctcagttggttagagcaccaccttgacatggtgggggtcgatggttcgagtccattcagacgcaccaatcatttttccttctgtaattcctgaattttatcacctgctccccgttggtattgctgacattaaaatgttgtgtattggcaaagcgttttccttgcatagtccatactagtccacatgagtgctaaggaagccaacccttttaatgagcatcaaaaatcgatcaacagaccacgccgtttaatttcttaatgataatcattccattcatcataaatatatgcatatgcaaatcgatatatcagataccccaccaggaatcccataactgaaagtaaaccccagagaaatttatattcatttactgagaaaaaaagaaccagccagccagcgcgatacctgaagcacctaatcccatcccagcccctctgataacacgggaaagcaggatgagtaatgttcgttttatattcataatccaccaaagaaatattcacatattttgttaaattctgctggattcttatcaccgaccatacgcgctgtttcgaaaggttttacaatatcctcaacaagaaaatacagaagatccagatctcgcagattttgcagtttatcatgcagtaccggatttctgcgcttcagatatcgggacgtgtatattgctctggatgtttcagcaccaacggataataataatccggcaagacttcctgcaaaaatgcggacactcctcttgaggcgttcccctcttcctcatcccgctccgcgtcaggtgctgcggcttcggtcctgccgccatatgggttaacagttgctgattcagcaggctgtcgatattgcgccccccggtgaacaaccatccggtagcgtgactgccccagcggttgctttaccaaactggttgcatcgtttatcagcctgttcctcatcgcttcactccatcttttctggcgttaaaattcatcattacgacctccattcgttacccttcgccacccactggccgcgctatcgcacccgcctgctttcgcgaacgctaccgcccgtcgctgtctccctacaggaacccaaagcgcattgggtaaggcagaacggtgatcttttatttaacgcccggaataacagtcgctcagcaataaatgtccaaggaaatcccgttcgtatccgcgtactgccggagtacgtccagttttaattcagtggcatctcggttcagatcgggagtaactgcgtaatactgacaaagacgataagcagaataaaacaaataaactgacaatattttgtaagacgagagatggaggccgtctggacgcagggcggaagcggtggcttcgtaacaacaatattccatactgaaaactattccctggtgtaaaaaagcgagcgcgcggtacaaccgggaggaaaccatgccacagtaaaataaagaaagtccagccccgaccgggccagactgactttttaagattaacgcccgaattacattgagaatttacatataaatgacctgagccattgatcatctaataatatagcggacggatcgcacacatccagaataagctacgaaaacgcaccatgaaatacattgctgtcctgatttatatcagtaaatcccccccgaccgtatatcgtataacagctcatattatccaggcgatcctgacagggataatattccccgaccataaagcgcagcggcagcttgcgcacccaccgtctgacagacaagtcccgcatattgccttcagacaaggcgatgactggcctgcgccatcgccagggcgtcttcccctgccggcagccgcgaaggggcatcagcatcatgcaccattcgccagacggcctgagcgacatccgtcgcctgcgtcacgctggcgttatcctgcatgctgtcgaagatctgctggccgagcgccgcatagctctccgggagctgccccatcgtccggcgggcgttttccccgaaccgggtctgcggggcgcgtcccgggaggatcagccctacgcggatattaaaagcaaggagctccagcgccagcgactctgtgaaggcattcaccgccgccttactcgcggtgtagacagccagcaggggcatcggttgcagggtgaccgccgaggtaatattaacgatggtcccgcttcggcgcgctctgaaccgggggatcaccgcctgggtcatggcaatcgttcccagggtattggtggcaaacaggttggctatcgcctcgcgcggggcgccctccagggcattaagcatccccaccccggcgttgttaaccagcacatcaatctctccgacttcggcaatggcctctgcgatactctgcgccgaagtgacgtcaagacgtaccagccgcaggcggtcgctggcgggtaacacaccttcctgcggagcgcgcatcgtggcaataaccttccagccttgctcgagaaaataacgcgccgtctccaggccaaaacccgatgaacagccggtgatcattatcgtttgcatatctctgtctccgaatggcttcttccttttcatcatagacaggccgtgccggacgatatagggtcaataatccatcattctttagcaggagtccggaaatgagcgatccgctggcggaggtcatcgcgatgttaaatctcagagcggtgctgaccaaaaccatcgagggggcgggagactggcgagtccggcgctcggatcaggggttgtcattttatggcgtcgtgctggaaggcggctgtcggctggaaattgaccagcatgagccgcagatcctgcgcgccggggattttattctgatcccggcggcgtaccgcttctcgctaaccagcctgaccccgcccccttcaccggcgctggaaaccatcccggtgcaactggcggagggacactttcggctgggcgccctcgacaagcctgcgcagatgcaggcgctgattggccactgcgcttccggttcaacgaacgccagcctgctggcctcgctgttgccagcctttgtggtggtccgcaatcaaccgcggctggccacctttgtcgggctgctgaaagaggaagcgcaggcggatcgcgcgggcaaatctttcgttctggcgcggatggttgagctgctttttatcgaggccatccgttcctccggcacgctcgcgacccccggtctgatgcgcgggctgagcgacccgcgggtcgcccaggcaatccgtctgctgcatcaggcccccgccagacgctggacggtcaacgccctggccgccgactgcgcgctgtctcgctcgacgttatttgaacgctttaccgacctgaccgggatgaccccgatgggctatctgttaggctggcgaatgaccctggccatgcagtggctgagcgagacgggcatcagcattgcggatatcgccgagcgcatcggctatggctcggccagcgcgttcagcgtagcttttacccgttataccgggatatcgccgggcaaatatgcccgccagcgggcggcactaaatgtctcctggccagctctgacttaacctgccgcaatctccgtctgcagccagcgctcaaacatctgcagcgctggctccccctccccgccgccgggtttgatcaagcagaagcgcttagccagcgtcggggagcccggccacggggcaaccagcgttccggcgctcagctcgctttccacatacatcttcggcaccagggccacaccctgctggctaagtaccgcggcgatcgccatctcatgcagatcgtagcgcggcccctgggcggggttatccagcgccagaccgcactcgcgggcatagtgcagccaggcgtccgggttttgccgccggtgaatgcgcgttagccggttaagcagccccggaagatcgtcatccgtcagcagcgcagcatggcagaccggcagcaaatactccgcaaataaaaacgtcacctccattccggtccacgccgggtgttcaaaatggatggcggcatcaaatccgcttcccggcagaatgaagggatcgctgcgggcggcgatattgaccacgatatgcggatgctgcgccgcaaagcgcccgagccggggaattaaccagcggctggcgaaggtggggagcacggcgatctccaggctgcggccatcgacgggcatcccgctgacgtcatgggtgtcccgttccaggcgagcgaggatctcgcggacctgacgagcatagcgggcgcctgccggattgagccgcacccggctccccgtcctgtcgaagagtttactgtcgaggagcgcttccagacgggcaatctgccggctgatggccccttccgttaacgcgagctccgccgccgcgcgggcaaagttgccgtgacgagccgcggcctcaaaagccagtagcgcagcgctgctggggattttacgacgcatagccaatgctccttgtgcaggctcaccgaaagtcagtgacagaatatcactaatacttgaattaacatcgtttttcagcgccatttttagccgataggatgatgaaaactcactaaagcgccttgtgcgcacatcatctgttcatcgaggtcactatgctctatgtcgtcgaatgcgcctacaccgatccccaaagcgaagcggcgtggaataccttttacaatcaggaaaaactaccggcgctggtctctgtgcccggtttctacgcctcccagcgcttccgcgctctcagcgagggctgcccctgctacctggcgctgcacgatatccacgatgctaccgtcatcgacagcgacgcctaccgccgcaacggcggcggccattttgcccgctggcaatcggcgatcgccgactggcatcgccacctctatctaacgaataatacgctgcgggaggttgccccggatgaagtgctgctgctgggcgataccgcggaggacttgcccgtcgctgcgccgatacacctgcagccaggcggcctggcgaccgaacaaacccggtatgccgccatcctcccacgagacaacctgcatcacctggccacgactgccgccgtctttatctatcagcccatcaccgcccggttacgcaacccggcgcagcgcgcgtgaggtcgccatgtcacctgctcccttttatacgttgaccgctggcgacctgacggtgactgccgtgagtgatggtctgatgtcagcgccgctgtccttactctcgggtatctcgcgggaggaggcggagcatctgcagcggcattcaggattagcctcgccggagaccattgcgattggcgcctatctgatccgcggtcgcgggaatacggtgctggtggataccggcaccggcggagccaatggcgttggcggcgaacttatcgccaatctggcgcggctcggcgttggtcctgaggagatcgacgccatccttctcacccacgcccatccggaccatatcggcggcctgctgtccgccgctggtacgccagcgtatcccaacgccacggtgttcctgcctacgcgggaaagcgcttactggctggcaacatccacgttcgacaacgccagcgatcgcggtcggcgcaacgtgctgcttgttcgccgtgtactggcgaactgcgcggcgcaaatcagcggggttgatgatgaggaggtgatcgccgggatccgcccgtgccctctgcccggccatacgcccgggcataccgggtatcgtctcgaagcgggcgatacctcgctgctgatctggggggatatcgtccatttcccgtccattcagtctgcgcggccagaagcctcggtcgccttcgacgtcgatcctgaacaggcccggcgtaccagggagatcctgctgcgccaggccgccagcgaacggtggttgattgccggtatgcatcttggcctgccgggattcgccagagtggagaacaccgcctcaggctattgtctgcgctcggtgtaatcgttgagcagaacaatgaccacagtaaaaccccggtcgcggcatgagcacgaccggggcgttttgtccgggaaagtggacgagccgttaaccgcggctcttccagccttttttacttttgcagctagctttggtggcgacccacgggtgacgtagctgagtcaactgaagatcctgagaggccgggctggccgaccagcgtttgttgcacagaggcttacgagttgcaatgaccataaaaacgctcctgaaaagtaatgaaccattccctgggtagttccacaagttcagaattagcgtatcaccgcgtaacggaagttatttcaatctttgttttagaatgtaaatggtcatcgccctctgaaatagcttaaattgatccaaatcaatttaagtgcatttatttttcgatgccacctatattttcaagcgcttaccttcgccagccgcctgattaagacttttcctataccgcataatacaacagaatcaagcgatattatcagatttttattctagttatgtatggctatgtggttatttgttttgattattctaactgataaaattcacttggtcagtcagcagcgggcaggtactctgcaccggcaagaagaggatttgtcagggagtggtggatgactaaaggctataaactacttggctataagttagcggataatattttctactgcctgcatcatcgggaaattatcacgctgcgcgggacacggacgcaagtccagctacgcagcaccatggcctgtttactggagtacctgctggcgcacggcagagaacgtctggtcagcgatgaagagttaatgattaacgtttgggaaaaaaataatctccgcccttccgcgcagcgcctatggcaggttattcagagcttaaagtctcgcttacaccaggctggcgtggagagcgcgttaatcatccgagttaagtgcgcggggtattatattaataacgtttacgtagccgaaatttattcatacaaaccgccggggatgatgaattatataaacacttcgcctgctgatatgaataagcttctggtacgcagctaatcccctccccgcgccgtttacatcgccagcaacagggtttattcgttgaatattttaattcacagcaataatatttattttaatatcggtatcgcccagtgttttcgggatattcagaaaacagcgcccgaattaaaggttattcactccctgcccctcagccatcttccagaactgtccgggctggatgtgattattttgtcactggaaaactatcatgattacctggctgccgctgaaatcgctcagcactttcagggcctggtcatcggctttacgtcagccggcaacgtaaggcgcggacgctcctttttcgcggataccctactgtgggtcagccagcgcgaagcggtacgtgaagtgagccgccttctgcgctgcctggccgagcgccgctggccactcgtgccgcgtcaccaacgtcagagcgtttctttccgtcaacgagccccgctcaaccgcctggagatgcggatgattgatgccaccatgaagggtcagtcggttcatcaaatggctgctacgcttgggattaatcgcaagcgggtctataacggcctggaaaggattaaagtgaatttccgcctggtcagtcatagccattttcatcatttcatgaccgacaggctctcttttagtcgcctgtctgccgacctccgatgcctgaccacagcagctaatgcaaccctgccgccgcgcgcagcctcacgaccggcggaaaatcattcatattatttgaaagagtttcgaaaattgttttgattttaagccccagcaatcaagcgtattctttatcacatcagggcaacaggccctttatcagacaccaaattaaggaatacaccatgaatttcatcaaaactttcgttgctgtttctgcgctgtctctgttctctgctgccagctttgctcagagcgtcagcgccactgcctccacgctggaccgcgcggaagctaaaattgccgcccaggccgcagaacagggtgcatcctataaaattaccagcgcccagtttaacaaccgtgttcatatgacggctgaactgagcaaataaacccttgcccctaaacgtttcctaaagcaccgcctggacggcgctttagtttttccccctgcctgacatttcccggcaggtccatgcggcattcgccggatcccggacaatactgactctcagcacaaaaagagcctgatagcaataaatacccgattggctggattatctgcggcttgtcggcgtaaagcggagaggtctgtcgccgcgaatcagtcggaggccttccgctgtctgcaaagcggcgcccattttggcaaaatttgcgtggcgtggtgagggtttgcagggcctccgtgccctggaaagactttattcgaaaaagacgtccggattttccgacagcgaaacaaaggatttcgtgtttttatccagcgcctgaatatcgccggtttcgatgtcgtagaaccagccatgcaggcgcagggtatggtcgcgcagaccaaccgccaccgaaggatgggtcttgatgttattcagttgggcgataacgttttcctgcaccatgccgttgaccttatcggtttcgctagcccaggttttcttttccaccaccgctttcgcggcatcggcatagcgtagccagtgagacaccgcaggcatcggctcaaggcactgacaggtggcgatcgctttcatcgcgccgcagttggaatggccgcagatcacgatatccgtcacgcccagcgcaaccacggcatattcgatggtcgcggaaacgccgcccggctccggcccgaaagacggcacgatattcccggcattacgaatgacaaagagctgtcccggctcctgctgggtaaccagttccggcaccagacggctgtcagaacaggagatgaaaagcgctttgggattctggctggaggccaggctgcggaagagttctttacgctgggggaagatctctttctggaagttgaggaagccctcaatgatatgttgcatagcagtgtctcttctctgtagttattacggtatgacaaagatcacagttattcagtttaccatcgatgacaagaatgggaatcgttattcaaacagttgcgcagaaaacgcgcgccgccaacgcctgcttctccccgtctaatacacacctttttgacgtgctttcctgaaccagtttgctactctgtctgctccaaccgtccacacgttaccgaccgcctgcctgcggcggacataacaggagtcgctatgttcctatccagcctgatggccattgccgcggtgctgatcatgggcgtgatcagtcccggcccaagctttatctttgttgcgcgcaatgccgtcgctcgctcgcgtctgcacggtatggtgaccgccctcggtaccggcgccggtgcggccattttctccattatggcgatgctgggcctgcagaaggtgctcaccgcggtgccggagctgtttattggtttgaaggtggcgggcgggctctatctgctgtggctgggctataaaatttttcgcgggtcggcgcagccgatggacttttccgccagcgggatggccggcaaccgctctttgctgaagaccttccgcgacgggctgtatactcagctcagcaatcccaaaactgcgctggtgttcgcctcaatttttaccgccctgctgccggcgcagatccccaccgccttctattacatcgtgccgctgatgagctttctgatcgacgtcagctggtattcgctggtggcgctggtgctgtctgccgaccgcccgcgccgcgtctacctgcggctgaagcggcggatcgacatcgccaccgcgacggtgctgggggcgctgggcctgcggcttatcgccacctccctcacccgctagcgggttacacggtatagatgcaaatatcgtgctgctgaaaggcaacgcgatattcgcgactgatattctcttccaccaccagcacatcgatatcgctgctggcggccaccacaaaccgcgctgcggccggaattttatccgaagtcagaccaacaataatttcgctgcactgtttaatgaccgctttcttgaactcgcagtcggcatagtcaaagccggtcaggcccgactctggcgccatcgcgcagccgccgataaacccctggtcgaataacatgccctgcacctgagccaccgccgcggcgccgacgcaaccgccgctcgcgcgctgcacctggccgccaaggatcaccacgtcatacagcggttttttcaccagtaccgcggcgatctccggggagttcgttaccaccgtcagcgccagttcggcgggcagcgcctcggccatcgccagattggtggtcccggtatcaatgaaaatagtgccgccgggcttcaccagccgggcacactgttgcgcgatcctgagctttatcgcgcggtttttatctttccgctgactgtaatcccccgcttccggcagactcagcaccgccccgccatacacctttttacagaatccctcgcggctgagctcatgcagatcgcggcggatggtatgctccgacacctgaagccgcgccgccagctccgcgcacaccactctgccattttcctgcaggatctggcaaatcaacgcttgtcgctgttggggaaaagcagcataatcgagcacgaaaactccttaaattatcaaaaacgagcaacagcaagcatgatcgtctgcgctgctttgattgtcaatgttcctgcccggaggtttaccatgaaaattgcccatttcgccctgtggacccaacagctcgacgtccaggcccgcttctgggtggacttctttgccgccagcatcaatgaaaaataccttagccagaccaaccccggctttgcctcctatttcgttactatcgacgatgaggtggtgatagagctgatgaccaagcctggcctgcagcaggccagcgcggataataaccataccggctgggcgcatctggccctctcggtgggcggggcggaacaggtcgatgccatcgcccaacgcgccggggccgccggaatactgatttcgccgccgcgcaccaccggcgacggctattatgaggcggtgatcgccgatcccgatggcaacctgatcgaaatcgtcgcatagtcagcagaacgccagtattcaggaggcatccatggcacattaccggattatcgacaccgcatcctggccccgccgggaccatttcactttttaccgccaattcgccaaccccagctttaatctctgcgtgccgatagcggcgcagcgcctgtacgaatgtgcgaaggaccgtcgggtctcgttttttcagctcgcgctctatgccctgctgcgcgcggccaacggggtaccgcagctacgccagcgcgtgcggaacgatgaggtgattgaatatgacagtctggcagtaatgacgccggtgatgaccgtcggagagggattccgtcaggtgtggtgcgacaatgcccccgagttcaccgccttcagcgccgcggccacgccgaagattgtcgcggcaagagagacatacccggcgccgctcatcgtcgatggcgagcattttatctgcgccagctgtctgccatggctccacttcacctcgatgacccatgcggaatatgccgtcggcgcggcggtccccgcgctcacttggggaaaattgcagaatggcgttatcccggtggccgggcggtttaaccatgccttcgtcgatggtctccacgccagccgcttttatgcccttgtcgaagagggatttaatgaccccgagcggctctggttgccgctaaccgaaaccgcaccctccctgcttcccccagcggcgaaggagcgttaacgtctgcccggaactgaccgccagggagccttcctccctgcacggcggtcggtacggggccactatcatcgttccctttcagccggcgaataccgcgcaggtgtgacgcctgttcagaacctcgcgattgaaaagctgggtcgcagacagcatgctgaccaaccatcatcagacagcggaaaacactgcttcatagccatagaatgggattatattgccgatcctttgctaaggataattagttataaatcatagcgtttcagtgttagacagggcgaagtgcgcctcttatctttcgtcatgaattgtaaataaccacgcaatcatttgatgaggtagcacttttgtccagattacaacaaggattaaaaaccagacaaacccgcttcgccctggcgctaaaagtggccctgctcggcggcgtggtagcattttcttctgttgcccatgcggaagtgatcctgaaagaaggtatcaccccggccactgacgccagccagatcccggccagcgccaaactgcggaaagacacggtggtggccgggatctccgagccgcaggggatctttaacccctactttttcgtcaacggctgggatgagaacgtgactaacgtcattttttcacgcctgatcgactgggacagccagggcaagctggtcccgggactggcggagagctggacggtcagcccggacagtaaagtctataccatcaaattgcgccctggtctcacctttagcgacggctcaccgctgacggcggaagatgtcgcctttaccctgacggtcctgctcgaccccagctatgatggcgataccgacatcaccctggccaatatcgctggcggggcggactacaaagccggcaaggctgacagcgtcagcggcctgaaggtcatcgacccgctcactctgcaggtgaccaccacgcagccaggcgccaccacgctggccaaaattggcgggcctgtactgtcgaaagcctggtacggcaaagggtatcagcggggaaatctcgactatctgcgctcactgcacggcaagccgctgggcaacggcccttacgtgtacgacaaatatattcccggtcaggaaattcgcttccatgccaatagccatttttaccgtgggacgccgccaacgccgcgctttatctatcgcgtgaccaatccgtccaccaacttccagctgttccagaccggggagaccgactacgacgcctttacctcgcgccccgacgatattgagcaactgaagatgctcggcttcgccaatattaatctttacggctccagcgactacagccaggtggaattcaacgtgcatcgcccggcgctacaggataagcgggtgcgccaggcgctgatttacggcctggataggcagaagctgatcgacgtggtctatcagggatacggcaaagtcgccatcgaaccgatcgcgccgatctcctgggcctttaacgctgaaggcgtcaacccttacccttacgatccggcccaggccaaaaagctgctggatgaggccggctggaaaccaggcgccgacggtatccgcgccaaagacggccagcgcctggagctgaccctgctggtgagcaagaaggtgctcaacgatgcgctgatccccatcgccaaggagaactggcggcagatcggcgtgctgctgaagccgcaggtggtggatttcaacgccctgatggcgcagcgcaaagccggaaattacgatttggcctcgttcagcaccagcaccctcaacgacccgcacgacggggtatgggatttctacagcagcgaagctaaagagtccggctaccataacgcggaagtcgataagctgattaacgccggcaacgcggtgctcgacatcgaacagcgcaagccgatctaccaccagctgtataaagtgctggccgacgatccgccggtgatcctgctcggctatcgcgagatcctttccgccagcagcgcccgcgtcagcggctttaagccggatatctacaacggcctgaccggcagcctgccggatgtaaaaatcgtcaaataaatccctggccgccgggttaaccggcggctgatgtgagaccgtcatgagaaatttcatcctgaggcgcctgctgcaaacgctgccgatgctgctgctggcctccttcattatttttttgctgtttgccaaaacccccggcgactttatcgatggcaatatcaccctgaccgctgcccgcgccgcggagctgaaggcgatctacggcctcgaccagccgctgttgacccgctacctccactggctgggacagttgctgcgcggtgatttaggcttttcgctgcagtatcagatcccggtcagccagttgctcaaccagtacatctggaactcttttctgctggccagcgtcgcgctggtcttttactggggcatcggcctggcggtgggcgtggtttctgccctgcgccctggctcctggtttgatcatctggtgagcgtcgcggtgtttgccgccatgtcgttccccacctttttcctctgcctgctgctgattaaatggttcgccgtcgatctccactggctgccggtaggcgggatgaccaataccggcagcgacgagagcggctggcagtatgtgctgcaggtggctgcccatctggcgctgccggtgctggcgctggtgatgctgcaggcgggcagcctgacgcgctatgtgcgcgccagtatgctcgacgtggtgaaaatggattttatccgtaccgcccgcgccaaggggttgcaggagcgcacggtgatcctcaaacatgccctgcgcaacgccctgctgccgattatcaccctgctgggcttcgagctgccggggctgttctccggggcgatcattaccgaaaaggtattcaactggccgggggcgggccacattcatatcgactcgctggccgcccgcgactatccggtactgatggggtttaccctgtttctggcggtgctgacgatagtcgggaatctgctcgccgacgtgctgtacgcctgggccgatccgcgtattcgggtgaggtcataatgatcctgtcttacttagtttcccgtcgccgccagcggcaggcggctatcccggcgctggcgcacaataccccctctccctggcgccaggggtggcgacagctgcgccgtaaccggctggccatgttctgcctgctcctgctggcggtgatggcggtgtggtgcgtgctggggcccgtctggtcgccgtggagtgatgatgccaccgacgccctgagcatcaaccagccgcccggggcggaacactggctggggaccgatttcctcggtcgcgatgtctacacccgcctgctgctggccgggcgcatctcgctgattatcggcctgctgaccatggtgatgtcggtgtgcctcggctacctgctcggcgccctctcgggttacgtcggcgggttaaccgacaaactgatcatgcgcgtggccgacctggtgatgactatccctgggttaccgctattgatcgtcgccggggcgatgctttctgagctcgatttttcgccggactcgcgcatttatatggtggtggtgatgctcagcctgctggagtggccccgactggcgcggctggtgcgcgggcaatgtctatccctgcgcgaacgcgattttatgctggccacccaggtgctgggtctgtcggcgcgtcgccggctgtttggccacctgctgccgaataccattccgattctggtggtgatggcgaccatggccgtcgccaacgccattctcagtgaatccgcgctgagctatctcggcctcggcgtggtgccgccgacgccgtcgtggggcaatatgatggatgccgctaacagcctgatcgatttccagcgccgcccctggctgtggatgccgccgggcatcgccatctttatcaccgtgatcgccatcaatgtgctgggcgatggcctgcgcgacgccatggatcccaatatgaaaccgaggctgaaatgaccacgccgttagtctcctttaatcatctttccgtctctttcgccggcgaacgctctcgcgtgcgcgcggtgcaggaggtctctttcaccattcaggccgggcaaaccgttggcgtggtgggtgaatccggctgcggcaaaagcgtcaccgccatggcgctgatgggcctcctgccgccgcagacggcgcgcatcgacggcggcgagatccgcttcgcggaccgcgatctgctgcggctgaaagccagacagatggccgatctacgcggtcaccagctggcaatgatttttcaggaaccgatgtcggccctcaacccggttttgaccatcggggagcagctgtgcgaaccgccgatccgccacctcggcgccacgccgaaagccgcctggcatcaggccatccagctgttaagcgaggtcggcctggcgcgcggggacagcctgatgacccgctatcctcaccagctttccggcggcatgctgcagcgggtgatgatcgccatggcgctgagctgtcggcccaaactgctgatcgccgacgaacccaccaccgctctcgacgtgaccgtgcaggcgcagatcctacgcctgctgcgggatcgggcccgggccagccagatggcgatgatgctgattacccacgatctgggggtgatcgcgcagatggccgagcaggtggtggtgatgtatgccggacgaattgtggaacaaggcgccaccgcggaagtgctacggcatcctcagcatccctacacgcgggggctgatcgcctcccgaccggtgcccggtgagcggcgtcggcggctgtactcaattcccggccaggtgccggatctggccgccctgccggcgggctgcgcctttgccgggcgctgcgagcgggcgacggcgcgctgccgggaggcgattccgccgctgctcggcgaccgccaacgtgctgcctgcttttatagcgaatttgcggaggtgacagcatgagcgaacgctatgtcattgaagtggatggattgaaaaaatattttccgctacgcgacggcctgtttggtcagcagaccggcgagcttcgcgcggtggacggcgtcagctttaatatccgtccgggcaccatttttggcctggtgggcgagtccggcagcggtaaaaccaccgtcggccggaccctgcttggcctgtacgagaagagcgccggcagcgtgaaatttcacggtcaggagctggccgacctgaccgcgcctgccctgcgcgctatccggcccaggatgcagctggtgtttcaggacccctatagctcgctgaacccgcggctgcgtattggcgaagcgattggcgaagccatgctggagcacaaactgtgcgcccgcaatgagctatatgaccgggtaatcgacgtgatgaagatctgcggcctggcgccggaacactatgcccgcttcccgcatcagttttccggcggccagcgtcagcggatcggtattgcccgggcgctgatcctcaacccggattttatcgtcgccgatgaacccatctcggcccttgatgtgtcgattcaggcgcagatcatcaatttgttttccgacctgcgcgacaaccgcggcgtcacgtttctgtttatctcccacgaccttggggtggtggagcatttatgtgacgatgtggcggtgatgtatctcgggcaactggtggaaagcgccagccgcgatgcgctgttcagccgccccctccatccctacacccgcgccctgatggctgcggtgccgaccctcgacccgcacagcgaaccgcaggcgctggtgcaaggcgagatcccggatccggccaatccccccgccggctgccgcttttcatcccgctgcccgctggccagcgaacgttgccgcagagagtctccggcgctgcgcgaggtggccccgggccatcgggtcgcctgccattgggtcgcatcctgagcgcggtcgatggggttatttatttctaaacaaccgaccgattgtgcgcggcagcgccaggatttactatccgccccgtcttgtgagacgcgcgataaatgaagcggaacatctttgtactcttttgcccaatggcttcgggcattttttctccacgcccgggagcgatcctcccggcaagaaatttagcggggcgcggtcgcccgtctgtcaaaacgcagcaatggaattgctcgtccgcgtcccgctacccttttcccgccgctaattaaataagggcaaaaaaataagacaacatgagattgcctggggtatagctttatcttattttttaagcgtgtactccctgttaaggtatcaacatcatgcttaagcgtcgcactctcaaaacagcactggcggcggttatttcccttgccgtcatggccgcgccagcatatgccaacccgggtaatggcaatggcaacggcggtgggaatcacgggaacagtggtaaccatggcaatagcggcaatcatggtaacaacggtaacagtggcgaccatggcaataaagggcaaaataaaggccagtccactgaagatcacggcaaacggaaaaactacggcaagcccgaccacgtcgacagcgatattagcttctcacgggcgcgctcccttgccgtgaactacggtctggtcggctatcaggcgctgccgccgggtatcgccaaaaatgtcgctcgcggcaaaccgctccctccggggatcgccaaaaagaccctgccagcttctatgattaacgacctgccctattatccgggctatgaatggcgggcggtcggagatgatctggtgctggtggccctgagcaccgcgatcgtcaccgccgtgattaacggtgtgtttgactaaatcacctacttattgaaaagcctcgcctcggcgaggcttttttgtgcctgatgccggtgagtgacggctcaccggcataaccagtatgataacggttcaaccaacccgggaccgactatggacaaagacacagtagtaacgctgttgaaatacaagcgctggattgaccttgccaccttacaggcgatccgcgcgattgacggaacggtacatggcgaaaagcgtcacctgaccatcaggctgatgaaccatatccatgtcgttgatatgattttccgggcgaacctgcgcggcaggccgcacggctacaccgcgctgaatacccctgagacgccaaccgttgatgagctggaaacggccatgaccgcctgtacggacgaatacattcagtacgtcagcgccatgacccccgccgatttccacgaacgtatcgccttcaaatttgtcgacggcggcgacggcaatatgaccgcgatggagatgctgaaccacatgctctttcacggcgcctatcaccgcggcgcggtgggctggatgattggcgaatgcggcggcgtgccgccgaaagaggtgctgaccgttttcctgcgcgaccatcattcctgaccgagcgaaaccattcgccgtcgattacgcggagaatcagcaggagctctgcctgatgtcgagtatggattttctggtacagggcgctaaggtgggttccgatcgtggcgataaatacgcccagatgtaaggcgtcatgccccgcaccagcagctccgccactgcgttttcggcgggcttgacgttaaagagctccatcaaggcgctgccggtgagaaacgccagtttctgcagcgccgatttccacaaatcaggatccagggtggccatcagcaccgtttccaggatctcgatataaatccggtccgtatcactcgccctaccgccgcctgtgagtcacagtttccgctgccggagcggcgcatgtggccgccctaatcagcatagttccgtcagcgaaacaataacagttccggttcgctgagcagcccgggaagcgtgacgccaccgcgctatcaagggggttcaggatccactgtcgcgggtttggatagcgccccccttccggcataacgtcagccagatcatcagggcgcacagcagggtgacgaccgccagcccgctaaacagtagcgtataagcagagtcatagctctcgcgcagcacccggagtgaaaaatcaggcaaaagcgcagccgcctgcggcatattgccggcccccagccagcctgcggcgcggtgaatcacctcgggggcatacccgtgaacgcgactctgcagggtcagggtattgcttgccgttaataccgcggagacgaccgccagggcgatcccctcgccagcaacgcgtacggtgttgaacaggcctgccgccataccggctttggcgaccggcacagcggatatcgccaggccatccatcagtccccagggaagcgccgcccccgccccacagaggatcagcgccagcaccagctgcgggaggtggttactgtgaaaagcatcgcccagcaacaccaacccgacggaggccatcatcagtcccgccgtggacacctgccccggtgaaaaccagcgggtgagcagggccgcaacggatgggaaaaccagcatcggcgcggtcagcgccatcagatacagtgcgctctgcgactcactcatcccctctccgcccataaaatgcagtggaacaataatcagcaggaccacgtagcaacagcaggtggcgacaggcaacaacagtacgccgacaaaacgcggatgacgcagcagggagagttccagcaccgggttgttcaccctccggcagcgtacgacaaacgccacgaacagcccccccgacgcgatgagcaaggccagcgtggtcagggataaaaaaccgcgggccggaataaccataagcgatgcagtaaacagcatcagggccagcgtaaacagggttaagccgaggttgtcgggtgtccgcggctcgcttttttctgccgctggcagatacgccagaccgataagcagaactatcgccgagagcagcgcaaacagggcgtatacgccgcgccaacccaccgcgtcggtcatgaagccgatcagcagcgggccaaacgccaggccaacgccgaacaccgtgcccaggatgctgaatgcccgggtccgctgagcgccatcatacagctgggccagcgccgcactgccgctggctaaaatcatcgccgcggccaggccctgcagagccctcaacacgcctgacaggaagagattgtgcgtcaggcaaaacagcaggctgctcaggcaaaacagcgcggcgccggcgataaaaatacgttttctgtcgatggtatccgccgtcacccctgcggccagcaaaaagctgccgaaagtcagcataaagccattggtcagccacgacagcgcagcgggagagccgcccagcgactgctgtatcgcgggggtggtcatgacgccgccggtaaaacttaacggcagcagcaaggccgccataaagacagaaagcgcggccagggcgctggcgtatcgggaaggtgttctggcggtgagtaacatcgggcggccctcatcagtcggcaaggaatgaataaactgtcgccatcctattgcggatgttattgccgataaatagactgaaaatatcttcttaagagacataaggtttataatcgatggacagcctcacctcgctgacgtcctttgtccgcaccgccgaaacgctaagctttgttcaggccgccaggctgctgggcatatctgcctcggcggtgggtaagaatgtcgcccggcttgagcataaactgggggtccggctgttcaaccgcagcaccagaaacgtcagcctgacggcggagggggccgcatttctgacacgctgccagagtatcctggagcagatccaggaggccgagtcagagctgaccagcagtctctcacagcccaccggcaaactgaggatttcactgcccgtcattggctaccgcctgttgctccccgccctcaccgcctttagccgtctttatccgcaggttgaactggatctcgactttagcgaccggctggtcaatctgatcgatgagggagttgatgtcgctatccgcagcggtgaattagcggactcccgcttgatcgccagaaagctgggaggctttcgttttgtgctctgcgccagtccggcctatctggcggaatacggcgcccccgactcgccagcggaattggcggcgcacaagtgcatttttttccgcttccccgcgacggggctgatccagccctgggaactgcgcggtatgcgactgacgggagatttcaggtccgctgccgtgatgacggtcaataacattgaggccgccattcgcttaagcgcggcggggatgggcatcgcttatgtgcctgattttgtcgtgcgcgaggcaatggatgagggacaactgcaggaggtgttgcccgggtgttgcatcaaggatgggcatttctcggtcctgtggcccgccagccgctatctgtcaccgcgaatacgctgttttatcgattttatggctgcggcagagatacccttgtcacccgcatcggcacccccaccccttgtatctaacaatttgaggtgattagctacccccactgaagcagagtgtgccgcccccttccctttaggtcagaaaagtctgcaccgctgaatcctgatctgcagcgtatggccctccgcttcacctttcataccagctcatctgggtgaacggttagtgggtttgaggtttactcaaccactacaacgactttgccaacctgtccatttgcttccatatagcgctgtgcatccgcaatatcctcaagcggaaatgttttatcaatgacaggtttcagtttgccggaacgtaacccttcggtgacgaaggattttgcgcgtgccattttttcagggtccgtcgtaatttcaaacagctcatatccacgcagcgtgagatgcttaccgagaatatcaaagacaggcacaagaaggtcgcggctgtctagcgcgccgtactggaagaacatcccttgcggtgccatcacctgggtcagttttgccacgtccggcccaccgacaggatcaaaaacaatatgggcgcccatgccatctgtcgcatgattgatttccgcaaccatatcctgctcagcgctagcgataacagtggcggcacccgctttaagaagcatgtctcttttttcggcagttcgggtaagcgcaatgggtttagcacccagcatgttagcaatctgtatggcagccagtcctacgctgcttgatgctgcgcggatcacaacattctgcccagcctgaaggttgccatattcaaccagcgcgccatatgcagtgacatacatcatccaacttgcagcggcttcctcaaaggaaagattttcaggatgcttcacaacagcgtgcacaggtgcattgaccagttcgccgtacatgccgtattcattaaacataaacgaagggattacgctgaccagatcgccagtggtaaacgcctcaacattctcacctacggcctgcacaacgccagccgcttcataaccaagacgtgccggaaattccggctcaataacatattggccgttgcggtacatgatttctgcacgattaagaccgatagcctgcacgcgaatctgaacttcacccgctgctggtgcgggcacctccatatcgacaatttccaaaacttccggaccaccggtgcggttaaaggtaacaactttagacatattcagctctcgtcagttatcagcacatctttcgaatattgttgaagacatgcccggtttatttactgacaatctacgctgctataaacgtaccaaaaatagctgacagggaacttcagtattaattatctgttaacaatccattggtttcagcggttctgcatggtcagaacttcactgaaccagtcgataaagacccgtactttgggcgaaaggtagtgcctgtccggatacagcaccgacacaggcttagacacagaagggtattgcgtcagaatctcttcaagagcgccggaagcaatatgtggagcaagggcgttaaaggtggcctggattatgccgaggcccgccagtccacaggagagcagaatatctgaattatcaaccagcatgctgcctacgggacgcaacgaaacaatcttcccgtccttagtaaatttccattccatcacatcacgactgtggtcgctgaaaaagtttattgcccgatgctgatccagatccgcaagtgtttccggtcgtccatattgttgcaagtaagacggggctgcacaggtgaccatcctgatgtcaccaagacgtctggaaataaaactcgaatcctgaagctcacccaggcggacaagacagtccacaccttcactaatgagatcggtttttttgtccgatgaaaccaatatgacatcaatgtcaggatacagtgactggaaatgtttgagattagggatcagtatggcgtgagccagcgccagcgggacatcaatcctgagccgcccccgaggtggaagggtaggtgaaaagctcgccatcatgtcattaacttcagacaatacaagcctggcacgatgataaaacgcctccccttcagccgtaacgctcaacttacgggtagtgcgatggatgagttttacgccgaggtcgtcctctatctgctgtatcgctttgctcacggtgggacgatgaatctgcagaatgtcagcggcccttgtaaagctgccctgctcaacaacctgtacgaaaatattaaggtattcaatcatgtttgaatgcacgtgatcacctggctttagttaggctgttcgtagctggtattgtaaagtaaacaattccgatgggcatcaaactaaggacttgatggctttcaaaatgtgcgctcctggctcgaagcgggcgtactgggtgagtttaaagtccgctgtgagcgaagagcggatattcagaccgactgatagctgattttgagttgccaaaaagagcgctcctattcagtacaaaaaagatggtaatgtttcataaaatctcttagaccttgcaggaatggttttgaaatgaatggatcttgtttgtgtggaacaattgaatttgaacttactcataaaccagcagtgttttatcgttgtcattgctcgctttgcagaaagcagagcggtgtgggttacaatctcgccacactagtcaaagacagtgagtttcgctggattaaaggggaaaactgcattgcttcatggtctaagccaacggggtaccgtacagatttttgcaatgtatgtggctcaactgtgcctaacagtctgcgagacgtaccttatgtctgggttcctgttggtttaattgacgaacgtcttgaaatggaatgtgcaggagacttctgcactgatgatgcaatgccctgggatgaaacccgctcacctagttgtcacgctggacctgtcgagtcgctagcctcgcttttaaagtacctgaaactcaattcctgagcgtcagcatttggcacaaagcagacgttaaaacctacagcatcggaaagcttctgaatgccgcgtcagcggcatggaggcgccagataaggttacatgtgtctgtggagtcaaatggcgccgaaagcccggcgtagccggttaccagcctataaattctgcctccgccctgccctggttagcctgaacccactaacagcaatcaagaaagttaaggtaatccctttaaccccggagcgctggctttacggcgtttacgacataaagggcgtgatttcgaggtccttagtcgaggtagcttgctgctgacgcttaggggatattcttcagttatttcaacgacaccagggaacttaacacggtagctgaaaagctcagcgccggagatcctgccgcccggccagcgaaagccggcggcaggtatacctctcaaggcagcatcttaccctttggcaaaattggcctggatccgctgctgcagataatcctcggcgctgatgggcgggtacttcctctgcggcccgaggatctcgacatctttattggcctggcagaaaaacgccaggctgtagcgcggcccctgatattcatgaggcagcggatttctcacccgatggaagttagacggcagctggtcgtcgctccagcgcatcagcatatcgccgatattgcaggtgatcacctcctcgcgcggctcaatgctggtccactgctggctttcgcggtctttaccgggacaaacctgcaggccgccctggccggggcgctggaacagcagcgtcagacagtcaaaatcggtgtgcgcgccggcccgccacatcccctgctgcgactgctcggttgcatagtaatgcagcatgcgcaaggtgctctgataggtgtcacgctgcggatcgtgcgcggtggtaaaaaacgattccggaaaaccgagcttcaaagcaaagcaggagaggatcttcatccccagctgccagcactgcgattcaaacccgagcatcgtctgctggaatgctggcaactcccgatcgctgggccagcacccggccatcagaggccgggttatctgatacgactctttttgatccggcgtgcgggtcgacggccgaacctgcgctttgctttcccagccggcgttaccggccagcggatactggcgcttcacctcgtcgggcaggtcgaaaaacgcctcggtcatgctgaacgcctggcggatatccgccagcggaataccgtgatggctgacctggaagaagccaatctccaccgccgcctcccacagttgttcggcaatgtcattttttcttgcggcaaagttcgacaggtcgatacagcgcacttcgcgggcgaaggtctcttcgccctcggcgcccatcagcgcctctttttccagttcctgtaaggcgtagcgttgattctgggtggttgcgttcatcgtcattatcctgttatcagttacacagcggcgcgctgttggagggtacggacggccgccagcgcgtcgtgacgcatcgcgtcaaggtcgagaccgggaatggcgtcgtcttccacgatggggcggccattgagcagtagcgccttcagcgcggcgcgcccaccgcaggccaccggcccaatggccatatcgtgcaggccgaagtagcgcggatcgtccagccggtaaatggcaaggtccgcctgcatgccgacctgcagggtgccgctctgcgctaagccgaggatctgcgccccgccggcgctgccccagcgcactacatcctccaccgtggccgcatcggccccaccctcaaaggtgcccccggcgtagcgcggctgcgccagcatccccttgcgcgcgcgctgcagcagccatgcggcatgggcttcgctttgcatatccgccgcttcattcgaggcggcgccgtccacccccagcgagaccgggaccccggcctgctctaacgccagcagatcggcgatgccgctgcccagccggccgttgctttgcgggcagtgggcgatgccggttccggtacggcccagcagggcaatctcctccggcagcagcttcaccagatgggcaaaccacacgtcatttcccagccagtcgtgttccgcgcagaactgcaccggcgtcatggcgaatttctgccgcgcggcgtcgagataatcgacggtttccgataaatggctgtgcaaccggatccccagctggcgggccagcttcgccatctcccgcagctgggcgcccggcgcggagtgcaggacggtagtgggcgccatcaccacccggcgcagagactcgggccgggggtcgtgatagcggctgaccagccgttcgacatccgccatatagccgtcgaaggtttccggacgcagcgccaccggcagatcctgttccaccgcccggccctgggtcgccccaccccggcacaggacgatgcgcatccccagcgcttccccttcgctgaagacaatctccgaggtatcgaaaggcatatccggccagtacaggtagttgtgatccgccacgctggcgcagcccgagcgcagaagctccaccagaccaatgcgcaccgccagacgaaaggtatgttcatcgaaagccgcgcgaaagcggtacggcgtggcgctcagccaggccgtcaggctctggttcagcccctgcggctcgcccttcagcagcgactgaaaaagatggtggtgcgtgttcacccacgccggatagatcacgcagtcgcgggcatcgatctgtcgctcttccggcagcggcgtcaggctgccgatggcggcaatcttgccgtcgcggatgcgaatatccggcccggccagccgcgccgcctctccgggcagaccgctgaggatggcatgggcatttttaatcattaatgacatggcgtcgctcctcagggtttaacctgcatggcctgaacaaattcggtggtgtaggcctgtttccagtcggtggccgccgccagcagaccggcgctgaccataaagtcgcgggtcttctgccagcgcgcgtcggtcatcgtcccccagccctggctggcggcatccccgccgtcgatcaggtgatgctcacggatctgggtcacgccccaggcgagcagatcgtcggtcattttcgggttgtcctgcttaatcaacgcattgcccggctccggatccttgagatagctcacccagccctccattgaggcgcggacaaacttcgccatcgccgctttacgctcggcgatggtatccgggcgggcgataaggatgccgccgtaggggggatagccgtgttcggaaaagaggaagaagttcgccttcactccggccttctgcacctggaacacctcggagctgacataggcctgctgggcgacagcgtcatcgacgacaaagggttgaatattgaaggtataggggcgaacctgcgcgtcgctcagctggtattgcgccttcagccacggccaccacgtcgcctgaccggagctggaaaccagcagggttttgtctttcagcccctgcagagaggtgacatcggcatgggtcagcagcccctggggatcgtactgaaagggcgcggcaatggcttttgcctggaagccgcgctgaatgccttccagcagctgcaggtcgtaaccgatgatcacatcggcccgcttcgacaacagcaactgcatgccgttgacctgcggtccgccggagcggatctcgacatcgagaccgtattttttgtacagcccggtggcctgagcctgataataccccccctgttccgcctgggcgtaccaggaggtcagcagaacgattttctcctcggcctgaacggccagcgagacaccgccgagggccatcaggcccagccagcgtatgccccggggaaggcgtgcgcctgttttcatatccctctcctctttacgccgggagggggagcgagcgaatgtggctcagcctcccatcccggtcaacattgaaccgcgacatggtgactgagcaatgtcccgtatggataacccgtactgaccgcttctactcacactcagctatacaaaaacaatgccagatttaaacgcctgcgagcggccgcgagaaatcgcctgcgccgccgcccttgggcatgcaacctttgattcatgctcacaagaaacgcaccataatggtgcgctaatgaatgattttagtgcctgcccgacatttcacagctggctgaagagcatctccagctggttcagcatcatcgaggcggcaagggaaagctggcgggcgggcgagacgcacagcgccagggtgaaaggcttaagctgcggatcggttagcggcacaaacgccagctggccggactcgatctcatcgagaatatccagccgacacaggatgccgatgcccatctgctctttgatcagggtgcggatcatgtgaatgttattcgataccgccacctcctttacctcgttgccgctgatgttcaccagcgcctccaccggctcgctaatcatcaatggggcggacggcaggataaaggggtagtcgaggcactgactaaagcgcaccgcgctgcggctggccagcggatggccggtgggcaccacaatccccatattcatctcggcaaacgcccggacctgcagttcacgagaggtctggggattgagcatgatgccgaaatccgcctcgccggagatcagcgcctgctggatgtggatattgttgatggtggtcaatgtaaaagagatgttgggataatgtttatgcacctctttgagcatcgtcgaaaagaaatgccggttaatggcatcgatggtggcgatgcgcacatgcccccgccgcaacccgcgcagatcgtccagctgctcgcagacccgggtaaagtcctttttccagttattggccgcgtgcaggagcagctccccggcggcggtcagcctcagcccggtgggatggcgctcgaagagcggcatcgccagctcctgttccacgcgcaaaatctgacggtcgatggaagacgccgacacatgcagcgcctctgacgctttacgaaacgatccctgacgggccacttcagtgaaatagagcagaaatcgggagaaagcaaacatggtttgggtgctctcatttttgcaacgggttgtgcgaatcaaagctctggacgcaacagttttatcacaataccgtagcattcatagcggagaaacgatcgtttcacccattttcttgcacgccggacagttcaccgcgaaggggagttatctcttcgccgcccctggccgccctgcagacagcggaatgagggagagtaaacggtaatgcacagccacgaacttatttcggtctcggtcggggaaatacgccccaacggacagggaaacctatccataattttgcagacggcggccggggaaatattaccggcctactccgccggggcgcatatcgatattattattcccggcgtcggctcccggcagtattccctgtgcggcacgcctgaccgcagtaatacttatgaaatttgcgtcaggctgactgacacctccaccggcggctcacgctatttgcaccagcagctcaaagccggcgatcggctcgccatttcgccgccgcgcaaccattttcccctgccgcaggccgggcgctacctgctgtttgccggcggtatcggcatcacgcctttgctggcgatggctgaagcgattgccgccagaaagggggcgctggagctgcattattatgtcgccagttcgcgccagacggccttctccccgcgcctgaaccagctgactgcgaacggcacggtggccattcactgcagcgaggaaggcgcgtcgcttcgccagcgggtccccgaatgcttaactgtgccccaccctgataccgcagtaatagcctgcggcccggagggttttattcagcgactgcggtcggtcatggaggaatatcgctggtcgccgtcgcagttcgtattcgagcgttttactcccgcggcggaaaataatactgcggcgaaaaatgcgttttatattgagctggcctccagcgggcagcgcctgcaggtggccgcggatcaaaccattgctcaggtattacagcacgccggggtggaggtaatgctctcctgcgaacagggaatgtgcggctcctgtattaccggggtcctcgacgggatccccgagcaccgggacagcgtgctgacggcggaagagaaagccggcaacgaccagatcacgctctgctgttcgcgggcgaaatcgccgggtctggttttggatctgtgaggagactgacgatgacgctcccctcctcttgtgcgccgctcaccggcatcagccgcgcccgactcccggcctgggcgctgcccgacggctggccgacgcaggccaacggtgaaccgctgctggcggacctggcctttcgcgacggccggatcgccgcactgaccccaaccgaccagccgactcccggcctgtgggacctggcgggagccctgacgctccccggcctggtggaaccccatgcccatctggacaagacattcaccattgaacgctgccgtccagcgcaggccgggctgctgccggcgatccacgccatgcatgaggatcgccgacactggtccagggcggatattcaacgccgggcgtccgccgcgctggcccgggcggcagcgaatggcgtgacccatttgcgcagccatatcgactggtttaacgccgacgcgccggacgcctggcaggaaatcgcccgcctcgataccgtcggcatcaccctggagcgggtggcgctggtcccgctgcccctgtttcgcgagctggcgcaagcggaggccatcgcccggacggtcgccaacagcggagagcgctgcctgctgggcggcttcatccactcctccaactgggacgccaccgccatggaaaatctgctgtacagcgcggcccgctgggatctggatctggatttgcatattgatgaggagctcagcgaagtgtctcaggggctgacctggctggcggatcatctctcccgccacccttttcccgggcatatctgctgcagccacggctgcgcactggccgccggcagcgacgaacaggcggcgccgatcctgcgccagctggcggcgcacggcgtcacccttatcgctctgccgatgaccaacctgctgctgcaggatgcgacgttcggccgcacgccgcgccagcgggggatcaccctgctgcacgaggcgcaggccgccggcgtggccaccctgctcggctgcgacaacgtgcaggatgccttctgcccggcggggagctatgacccgctggacaccctggcctgcggtctgttcagcgctcagctcagcgacctgttcgaccagcagtcgcggctgatctgcgatcgcgcggcgctaaccggttcgccggcagacgcggcgccctttgccgtcggagcggcggccagcgtggtgattttcccgggtagcgaccgttttacctggcctttaaacagcgccgcccgtctggtggttaaccacggcaggttaacccaccggcgcgtgtggcaggaggagatggcacatgagtcttgaagcaggcgccggggcgccgctggcgcggtatgccgcctggcgcagagccggcgattttatctttctctccggcattattccggtcaatcccctgaccggcaccatcgtcaacggctttcaggatgtgcctgagccggtgcgggagctgctgggggcgaccggcgaattttcaaccgatgcgaaacagggcccgatcctcgcccagagctggtacgtcctggagagcatccgccgcaccgtggcgtccgcgggagggcagatgagcgacgttatcaagctggtgcagtactttcgcaaccttgaccattttccctattacagccgggtcaggaagctgttttaccccgaccagccgcccgtttccaccgtggtgcaggtcagcgaaatgctgcccgacgccacggtactgattgaagtcgaagcgaccgtctggttacccccgtcatttaactccgaggcaccgcgatgattaacggttacattcctgccgcgcgctttcttccttttctgagctggacggacgtggccgccctgccggataaaagcaatacggttatcgtcctccccaccggggcgatcgaacagcacggcccgcatctgccctgctcggtggacagcgtgatatcttccggcgtggcgggccatgccctcgccaggctgccggcgacgatcccggcctacgccattccgccgatcgtctacggtaagtccgaggagcatctgcattttcccggcaccctgacccttagcggcgatacgctgctgcataccctgctggagatcgccgaatctctctatcgggccggttttcgcaagctgatgatgatcaacggccacggcggccagccgcagatcctgcagatcgcctgccgggaaatgcgcctgcgccacggggatttcatcgccatcccccacgacgtgttcaacgtgcccaactgcgaaaaacagtttctcagcccgcatgaacagcggatggcgatgcacgccgggcatagcgaaacggcgctgatgctggcgctggcgccggagtgcgtccatatggaacgggccgtcgctaatttccccccggaattcccctgcccaaccctgtcgaaaggccgcccggcggcggcgtgggcgtcgtatgactttggccccagcggggtgattggcgacccgaccccggcgacgcgggagcaaggcgaagggcttctcgactccctcgccgccagctgggcgcaggcgatcatcgagatccaccgcatggcctgggtcgaacgtcgcgaaccgacctggggcaaacagcactggcacggctttgtgcagtccctaccaccttctttcgctgctgaatccagggagccctgatgaataccagattgacgcccgtttttaccctgctgaccgtggccgccctcgcgacctcagcctcctgcttcgcggcggagaagtttacctttctcaccaactggtatgcccaggccgaacacggcgggttttaccaggcccaggccaccgggctgtatcaacacgccggtctcgatgtcgaaattaaaatgggcggcccgcagatcaacgtcatgcagctgatggcggccggtcaggcggactgcacccttggcgacaacggccaggcgctggagacctggcaggccggggtgcacgcggtgaccgtcgccaccgtgttccagcactcgccgacggtgtttatcacccatgacaaagtggagaacccggcggaacttaaagacaaaaccttcctgctcgccaccgaggcctatacctccttctggccgtgggcgaaaagcgagctgggtctggctggcagcaaagtgcgcccctatacctttaacgttcagccgttcctcgccgataaaaatctggtgcagcagggctacgtgacctcggagccgttctccgtcgccaaaggcggacagccgttctatgtctatccgctcagcgactggggctacccgccctacggcaactcgattatctgtatggccgacaccatccgcaaacgtccggcggcagtggcggccttcgtcaaagcctccatggaaggctggaaaagctacctgcaggatcccgcccccggcaacagcctgatcggtaaagcgaatccgcaaatgggcgccgagcagatcgcctttggcattgcccagatgaagcagtaccagctggtgaccggcggcgatgctaagtccggcggcatcggcatcatcaccgagccgcggctgaaaaaaacctgggacatgctagtgaaaaacaaactgatcgacgccagcaaggtgccgtttgagcagacttacaccctggagatggtcaaagacgccggagtgatgccatgaataccgccccgaaactgaccgtgatgagcgatacccgctttatgcccgccgctgccaccccagccatcgaggtgctgtcggcggagaaaatctacagcaacggcacccgggcgctgctgcccgtcaacctgaccatcaatcagggggagtttattaccctgctcggcccgtccggctgcggtaaaagcaccctgctgaagatggtcgccggcctggtggagcccagcgacggcaagctgatgctgtggcggcgcgacagtcgggaaaaggcccagcatccgctgtcgttcgtcttccaggaagccaccctgatgccgtggagcagcgtgcgcaacaacgtcaggctgccgctggatctggccggcgtgccgcgggcggagggcaatacccgggtgaatgaagtccttgagctggtgggcctcggcaagttcgccgacgtcctgccgcgcgaactctccggcggcatgcaaatgcgcgtctccatcgcccgcggcctggtcacccgaccaaagctgctgctgatggatgagcccttcggcgcgctggacgaaattacgcgtaacaaactcgacagcgacctgctgcgtctctggcaggagcaaaacctgacggtagtgttcgtcacccactcgatccacgaagcggtgtttctctcccagcgggtgatcatgatggcggcccgtcccggacgggtggtcgaagatatccccatccgcgagccgttcccgcgcagcgaggcgttccgcgtcagcccggccttttccctgtatgcccgtcagctgcaggacagtctgttgcaggccagccagtccggtatggagtcataatatgaaaaatacaaccgcaacgccgtggatccagcatccgcgttttctcaaaattctctatccgaccctcgtcgcggtggcgatggtgctcctgtggcagggcgcggtgagctatttccgtatcccggcctttctggtgccgtcgccgctggtgatgctggaaagcctgtggacgcatctcacgccgctgctgctggcgctgctgttcaccctcaagatcaccctgatctcgtttctactgtcgattgtcatcggcgccgcggtggcgtttatcctggtgcagaaccgctttgtggaaaccgccctgtttccctacatcgtgtttttgcaggtgacgccgatcgtcgccatcgccccgctgatcatcatctgggtgaaggatgccacgctctcgctggtggtgtgcgccaccctgatggcggtgtttcccatcatctccaataccactcagggactgcgcagcgtctcccccggcctgctgagctattttcgcctcaatcacgccagccgctggcaaacgctggtgcggctgcgtatcccctcggcgctgccctatttcttcggcgcgctgcgtatttccagtgggctgtcgctgattggcgcggtggtggcggagtttgtcgccgggaccggcgggaccaataccgggctggcctatcagatcctgcaggccggctaccagctggatatcccgctgatgtttgccgcgctgctgctgatctctctcgccggtatcgcgctgtttggcgtgatgtcctgggtctcgcgccgggcgctcagcgcctggcatgaaagcgaagccgtgcaatctcattaatgttctgctgacgaacaggaaaaagaatgatgactgatgaacagcgtcaacacgcggtcgcggcgatccagcaggcactcccggcgctggagtggaccttacagccggcgaagatcaaacggctctcccgcgattttcactggttcagtccgctactcaccgagcaactggcggggaaacaggcggacgcggtggttcgcccgcgcgatgaagaggagctgcgccagctggtctccgcctgcgcgcagcaccagctgccgctgaccctgcgcggcagcgccaccggcaactatggccaactggtccccctcgaaggcgggctgctggtggatatgaccgggctcaaccagatcgtcgccctcggcaacggcacagtgagggcccaggccggcattcgcctggcggacatcgaaaccgctgcccgccagacgggctgggagctgcgctgtatgccgtcgacctatcgactggcgagcctgggcggtctctacggcggcgggttcggcggcatcggctccatcaactatgggccgctggcggcgcccggcaatgtgctcagcgtcaaagtgatgaccgtcgagccggtcccccgcgtgctgaccgtcccggctcccgaagcgctgctgctgcatcacgcctacggcaccaacggcattatcctggaggttgagctggcgctggcgcctgcgcaccagtggattgaacgtctggacgtgtttgacgatttcgccgatgcgctgaactatgccaacgcctgcgtccgctcgccggggctggtgaagcgccaggtggcgctgctggccacgccgatcgctgactattttagccacctcaacgatcgttaccatgccgggcaacatgcggttatcagcctgatcgccgaggagagcgaaggactctgcgccagcctgttacagcgccatcgcgggagcaacgccatccgtcaggccagcgacgaggcccggacgcaaaacgcctcgttaatggaatactgctggaaccataccaccctgcatgcgctcaaggtggacaatacgctgacttatctgcagacggcgtttgatccgctgcgctatccgcagcaaattttacagatggagcagcacttcgccggggaggtgatttcccatattgaattcctgcgcgatatcgaaggcaacctcaccgccagcggtctgcagctggtgcgctataccacgcccgcgcggctcaacgccatcatgcagatatttcgcgacaacgacgtcaagattaacaacccccacgtgctgcaggttgaggacggcaaacagggcgtgattcgccccgacgtcgtggcggtgaaacagtctctcgacccggcgggattgcttaaccccggcaagctgcgcggctgggcgctgcgcgaccagctggaactggacagcaacccgctggcgcgagccacccgcgaaagccccacgacctgagcgtcccattccggggcgcgctaaccggtcgctggcccgcttctcttcctcctgcccgcgcggcgagtttttttacgccactcattcatatgaatgagtgccgtctctgtttcctccgttatactcatcaaaaaagcgacgataaatttattatcacgggttaattccgcggttcagttttcgtgtcggattaaatagttattccgaacacactctggcggattatttattacgcgctgtcattttattacaacttgccgattaccggcctgaacgacaaaaatgaccgtaaaatgagtcgacataaatttgcccctatgaattaagcatatgataaaaacgttgtaaattatttttattcaacacagcaatagtgaggataatatgagcgatgccatttcttcgcaacttgaaaacatcattacgatgctgatcgccatcagtatcgcctcggaaagactggtagagataatcaaagggtattttccctggcttaatctggaaaatcaggatccggtcatcgaaggacgacgcaaatctgccctgcagatattagcggtggttgccggtattgtgacggcgtttttgacccaacctttcgtcgccggcagtttctcggccattaaacatccggacctgatgacattatgtattggcctgatggcaagcggcggatcggcattctggaacgtcattcttaattatctgttgcaagtgaaaaacctgaaaaagcaacaagtcagcagcgtgaaaacggatccagtagccgatcctgcccccccttctccggttcatcaggacgtggttcatggcgcagagccggtcagctcaaacccctgtttcaatccggagggtaaataacatggtatggcgtgtcgcaaagagtctgctgatactcagagatcagattaatcaatatgctccgcatcgcaacacggacagcgatggcaccattggtgatgaacatcatgcccacaccaactcggatcataatccgcaggtgatagatggaaatattggtgtggtaacggctatcgatattacccacgatcctcaacataaatgtgatgctcaggcgattgtcgatgcgttggtcgccagcaaagacaaacgaattaaatatattatctggaacaaacggatcattagcgcttctgtccagccttgggtatggcgggattaccatggcgtcagcccgcacgataaacatttccacttatccgtggtgccggtgaaagcgctgtacgattacaccttaccgtggctgttatttaatccacataaagaatgatccagtttttttccgattaccgtgaggcgaatatgactcaacaaatcgacattgagaaaataaaagcggcactcaacgccattgaagaactcgaacagattgcccgttcaacgcagccggccgatattaaaaatttttgtgtggaatataacaaaacatggaaaaagaaagtggataccctgctggcgctgattgatgaacccatcagttcgctgttagttaaactggtgccttacttacccacactgctggtgattattaacatgctaaaggcgggcgttgagcaatattgtcaactgcatctcgcggaggagcctcccgtagataaataattgccacccatccggccagggcctgctcaggcactggcctccctccccactaccccatctgtccacgtttctctcagcccaacgccgaccttatcctgcgccggacagtcccgccatatggacgataagccctaccgcggcggcggtggccagtacccaggtcagcttccacttatagcgaaacagcagcccggcggcgcccagggcaatggctgcggaccacgggtcgaaaccggatggcccccagacgctatgccagataaaaaacagcgccagattcaggataacgcccaccaccgcggcggtgatggcggtcaacggcgcggtaaatcccaccttattatgggtcgtttcaataaacggcccgccggcgagaataaagataaacgagggtaaaaaagtaaaccatgtcaccaggcacgccgccgcgatgccccccagcagcacatcatcgacgcccaacaccgctttggtgtagccgccgacaaacccgacaaaggtcaccaccatgatcaacggtccaggggtcgattccccaagagcgaggccgtccatcatctgccctgccgtcagccagccatagtgggtcaccgccccctggtaaacataaggtaagacggcatatgccccgccaaaggtcatcagcgcggctttggtaaagaaccagctcatctgggtcagcggatgcgcccagcccagcattagcgtcagggcggccatcggcaccagccacagcagcatcccggcgatcagcacctgagaggtacgccgccagctgaaaatggcatgggccgggatcggcgtcgtgtcatcaatgatggcggctccgccagggtgactctgcgcatggtgggcgtccgctctgccgaatatcgtcggcgccagccgtccgccgataaaacccaccagtgccgcggcgaggacgatcagcggaaaaggaacgttcagcgcaaaaatagcgacaaaggcagcggcggcgatggcccagtaggcgccatttttcagcgcccgcgagccgatgcggtgcgccgcctgcaatactatcgccgctacggcgggtttgatgccataaaagatccccgccaccacggcgacatccccccagacgagatagatccacgccagggcgatgagtaacaccagcgagggcaaaataaacagcaccccggcgatgacgcctccccaggttttatgcatcagccagccgatataggtcgccagctgctgggcctccgggccgggcaggaccatacaaaaattgagcgcatgcaggaatcgcccttccgatatccagcgtcggttatccaccagctcctggtgcatcatggcgatctgcccggcaggcccgccgaagctgatgaagccaagcttgagccaaaagcgaaatgcctgccagaaggagacggaagcgacgacggaaggactgtcactctgcggaagaacgaccgttttgctcatgattgccagacctcatttcacaggacctcagtaagccgtcgaacagcgagcaagctgccgccagcagttggtcatcgtccgtaatggtttcccgcagccctgcaagaatgctttctacccccgccgcctccggggtcggtaccccaccgacgtccaggaagtggatcaaccgtcccagactgtcggggatcaccgcgtccagcacaaaacgccggaccagtacttcgaaggtcaccagcgtgccgacatggctgaatggcgcgccgtcaaaatcaaaaccgaccgccgtcgccggacaggtctcgggcgcggccagccacaggaaccgcgcctcgtcgtcaataaagcgccggataagccaggcgctggccagacgatcgacccacgggcgtcggcgggtggcccacagccggccgcgaaaggcgcctctgtccagcaggctcagttcgcccgccaccgactgcggctcgttcggcgatagccgctgattaatgacctgctcgatagtggccagtcgctcagcggcttgctcccgggcggcccccggaaagaaatcaatggcctcgatccgccggtagtcacgctgaattttacgcagttgtttgagctgagccgccagttcgtcgttggataacgtcccctgcagcgcctgcagatcctgcaacagcgcgtcgtactgttcacgacgatcgaatagcggcctgagcgcctcttcttccgccgcctcaatcgtgaaaacatacccggtccccccttccgcgcggatcgcctggcaggtgctgaggaaagtgtcatagccctggcgcacgtcgggcagcagatagaccccatcgcgcaggaccgctgccccgctctgcttcagggttcgccagacacgcatgcgcagcgtggcttgagacgttgtcaggttaaggatcaagagatgcattgtcatgttgtagagattactacagcatgtagcgtctgtgacgtttttacgcgcaaggagtcagatgaatttcagcaatgcatagctgaaaaaagcaaaagacggcctgcgcagcggcaggccaggcgctaagcgcgggatggggataaggggcgcagcagcagggtcaacaacgccaccgcaaccgggaccagggagccccacagcacggcgttccagccgaaggcgttgagcagaaccccggacgaaaacgaccccacgatcatcacgccgaagaccagaaaatcgttgagcgactgaacctgggtcttctcttccgggcggtggaaatcgatgattttcgccgaggcgccggtgaagccaaagttccagccgatgccgagcaaaatcagcgacagccagtaatgatacacgccgagaccgctcaggccgaccgccaccgacgcggcggtgatcagcaatcccgccgccgccattcgcactgcgccgaagcgctggatcagccggccggtgaaaaatcccgggccgtacatcgccatcacatgccactggatcccaaggttggcggcctgctgggaaagaccgtgcatatgcatggagagcggcgcggcggtcatcagaaaattcatcaccatataggccaccgcgccgctgaataccgtagtggcaaaacccggctggcggacaatctcgcgcagcggccgccctccgcgcacgctggccgcggtgggctccgccggcgtcacccctctcaacaaaaaggcggccagcactgcaaccagcgcctgagcgaggaaggtgacggcgaaggtatgtgccggccagaggtgcatggtgccggtgaccagcatcgggccaatgatcccggcggccacaccgccgcccatcaccagcgacagcgcacgggcgcgacgcgccggggcgacgccgtcggtggcggcaaaacgaaaactgagcgccacggcagcataggcgccgccaagcatcgcggcgagacaaaacagcagaaaagaattcagcactaccgccagggcggccgccagtccggtcaccatcccggcgccggtgccgagcctgaacgccgctttgcggccccgcgttcgcgccagcgcgccgaaaggcagaatggaggccgccatccccagcacaaacagggtgatcggcagcgtggccagcgacgggctgggggcaatcgcgttacccactatcgcgccggtagcgtagaagaccaccgagttggcgccggccagcgcctgagcggcagccaggcgaaagatgtttttgttctgcaccgccagcggcagcatgtgttctgtagacatccgttgttttcaccggtttgagagtggcgccaggctggccgtctggcatcgcgccctgtttgttgggttccctgaccgttaccttagccgcaaaatacgcttttgcaccatagcgaatcgcaatattacccggcgatctggcccctcttctgcgtcagatcgccgggccgggcttcgccgcgcgttttattccggggatccgtcgcgccgcgcggcggcaaatttcgccgcgatcattgcggccgtcggctggacgccgcccagactccactgctccgggtcatgttcgtcaatgcggatccagacggactgacggaactgcggatcgccctgcccctcaatctccaccagcagatcggtcatccgtcgcagcagctcacttttctgttccgcggtcatgatccctttaatggtttgcacgttaacaaatggcacgctattctccttagcatctaggtctaaaattcaaactcagagtagaaggtcaatctcgcgatgtcaaaaaataaatcactgccctacctcgacccggcgctgtgcggcctggcggaaggagccaaaatactcggcgaccgctgggtgctgctgatcctacgcgaggcgttttacggcgtgacgcgctttgaaacgttgctgtcgcacacccatattacccgccagacgctcaccacccggttaaaaaccatgaccgaaacgggattgctcaacaaagtgccctaccgggaagccggctcccgcgaacggtatgaatatgttctgactgataaaagccgtagcctggcgctggtgctgttcgccctgatggaatggggccaccagcacgtgctgcacagtgcgccgcatatagcattggtggacagcgccagcggcgaggctgtccatccggggtttattactgccagcggcaccgtggcgagccccgccgccctgcagatcgtcaaggcagacgaacgctaatagcgccgctacagaactttcgtacgcctctggcgaaagccgccgcaagcgggtatgttgcatagccacggtacccgacgagcgcgggacatttttgtttcatcgaactgtgcgataaaggatgaaggtatccggtgaccattccgacgcgcagatcgcgcatgctaaaggtagaaaatgtcgcttcgttctctgcgggctttatgtctgaccagcttttttattgccgacgtgcgcgacggcctcggcccgtttctggggatctttctcacccagcgtcactggcaggcggaggacattggcctgctgatgtccgtcggcggtatcgccggcctgctggcgaccctgtccgccggcttcatcaccgacagctcgcggcataagcgcttgctgctggccggggtctgcctggtgatcaccctcaccaccctgctgctctggtttagtcagaagaccagcgtggtcgccctctcgcaagtcgccagcggcatctgcgcggcctttgtcggaccgctgatcgccgggattaccctcggtcttgccagacagcgcggctttagcgcccagatggggaaaaacgaagccttcaaccacgcgggaaatttcttcaccgcgctaatggccggggctatcgcctggtactggggcatcggcggcattttcattctgatggcctgtaccacgctgcttaccctggtcgccctgctggcgatccgcggcggcgatatcgacgatgatgccgcccgcggcatcgaagcggcatccacgccctccctgccggggtttgccatcctgttccgccatacgccgctgctgatcgccggcgtaaccctgatgctgttccatctcgccaatgccgcactgttgccgatgctgagcatgcggatcgccgccgcgccgggacacctcaatcccggactgtttgccgccgccacggtgattatttcgcaggtggtgatgatcccggtggccatccgggtcgccggcagcatcgacaaatacggttactggcgatgcatcctgctggcgctgctgatcatgcccatccgggcggcgctggcggcgtccagcgacgccccggcgatgatggtcccggtgcaaattcttgatggcctggcggcagggattttgggggtggcggtgcccagctttatcgtctcgctgctgcgcggcagcgggcacgttaacgctggacagagcgtggtgatgctgatgcagggcgccggggcggcaatgagtccggcgttaaccgggtctatcgccgggcactactcctatgccaccgccttcggcgtgctgagcgttatcgcgattgtcgccctgatggtatggtggcgcagcgctccgctgctcaccgtctccgcgtcaccgccagtcggcgagagcgggcagtaacctacggcacagcgacctggggagagaggaaatcgccagccgggcagcagccccctgctgcccgcctgacgtgtgagtggcgttaattcacccgcgcaggcaaggtaatttgctgcagggcgttcgccatattaatctgaatcagctctttaagaccttcgcgcttaataaactggctccggtgcttacttttcacctcttcaatactctttttgatctcttgcgccggcagtttataccagccgcgagcctgtttctcaccgcccatttccagccacagcgatgaataactggctttcaccagatcgcttttcacgtgataatcagaatcgatggcgtagaccgtggagatgttgaaatatcgcagcaaaccatacagcacgctcatgatgatatttttcggccgcgcgccatgcagctctttagtcagcatcttcacttcgtcattggtgatatctttcccgccctggatgccgccgatataagcgcggccatcgtcggtgcaggaaaaacagacgctatagacgcgccggtcgccaagaaacagctgcagcatcagctccccttcctcctgaaacggcgaggccagcagcttaacgtcaagcttatcgccatttttcaagggaatagaaaacatctcgcggccaaaatccgcgacattgtagagctgcggcaggacatcagggtgaaacgttttctcgatgaaattcagtgaaccatgggcaatatccagtttgcgtcgttttgacagccgtttattgagatacgctttaaacggtttatcctcaaaaggcaccagtcctttggtcaccgcggtcaaccgcgcgcactgatatttcgcacaaagtccttgatattctctgtatttacctcctgcgagcgagagctctctgcattttcgtaaaatttttttatagcttattttgacctgaccgatcactttattatgtttacgccattctttgatggcgcctgcaacagtatgttccattgattaagatccatagattcatccataatcgcggccatattaacataaaagcgtttcgtcaacgcttaattactccttcgttgtcctttcatttaatatttaggcaggaaattatcctggcgacgttatttgtcgctaaacttattctgtcaacgattatttatggtaggtaacgccctccgctcagcgacttaacgctctgtgccttcggcgcgaagcgcggctacatccgctggcggttatgccctatacttgaccctgattcaaaaccagcaacgataggtaacttatggaaattgatctcgacaacctggtcttcagcggcctggatgaagcggaagagcgcaacgcggagcgtctggaagaagcggacaaaaaagcccaggcgatcgttgccgacgacgactgcggcgacgcctgcaaaatctgattgtcaaaccggccagcaggccggttttttttgacgcccacacctcaggtgggtaaaaaccctttcagcgtatccagcagcgcctgcgccgccttcgacagcggcagatgtccggcatggatcgcgccgacgcacttctcaatcggcggatcgctgagcgggatgcagacggcgcccaacgatgccatctgcgttttacacagcgccggcaccgcgctgccccccaggccgctggccaccattctccccaccgtcaccagctgatgactctccagcgccacgtccagctgacgtccgctgcgcgccagcgcctcctccagcatcaggcgtaccgccgaggggcgctgcagggtaataaagtcgagggtcaacagctcctgccaggtgagctgctttttcttcgccagcggggattgttggggaacgatcgccacgaagcggtccaccgccaacggggtaaacagcaggttgtggttgggcgatggctcgaaagcgatgcccatctccacccgcccctcgcgcaccatctcgatcacctgctcattaatcacgtcatgcaccgtaacgttcaccccggcatagcggtcgcgaaaggctttcagcgcctccggcagaacgttggcggcaaacgacggcatcgcggcgaccgaaattttaccccgctgcagggtaaagctctgacgcatggcctcctcgacgttatcccagtcggccagcagctgacgggccatcggcagaaagagttccccctcctgggtgagggtcactttgcgagtgctgcgctgcagcagcgcgccgcccagcgcctcctccaaccctttgatggtcaggctgagagctggctgcgacagattcagcctttcgctggcgtgggcgaaattcagagtgtgagctaccgctaaaaacgcgcgtaactgtttgacactcattctcatttttcttcctgttaactaattgaaaaaaattagttaacaggaaattaattaaaattccaaatgagtgagtcacaaattcaaaattatcaaatcagtcgcctgcgccaatgataaggctatcgcaaggcaggagagacaagatggcaggactggataaacgcgtcgccagttacgaagcggcgctggaagggttaacggacggcatgacgctgctcgccggcggcttcggcctgtgcggcattcccgagaacttgatcgccgaggtgcagcgtcgccaggtgcaggggctgacggtggtctccaacaactgcggggtcgacggtttcggtctcggcatgctgctggagtcgcgccaggtcagcaaggtggtggcctcttacgtcggggaaaacgcgctgtttgaacagctggtgctgagcggcgagctggcggtagaactcaccccgcagggaacgctggcggaaaaaatccgcgccggcggcgccggcatccccggcttttacaccgccaccgggtatggcaccccggtcgccgaaggcaaagaggtgcgccagttcgacggccgacactacatccttgaagaggcgatccgcggcgatttcgcgctggtcaaaggctggaaagccgactggtacggcaacgtggtctatcgccacaccgcgcagaatttcaacccgctgatggccaccgccgggcgcattacggtggtggaggtggaagagattgtgccgccgggcgaactgcccccctccgccatccatactccggggatctatgtcgaccggctgatcgtcgggcaattcgaaaaacgtgttgaacagcgcaccctgcgcgccggaggacactgagatgctgacccgtgaacaaatggcgatgcgcgtcgcccaggagctgcgcgacggcgactacgtcaacctcgggatcggtatcccgacgctggtggccaactacattcccgccggcattgaagtgatgctccagtcggagaacggcctgctggggatgggcgaatttcccgatgaggaaaccatcgacgccgacatgattaacgccggtaaacaaaccgtcaccgcgcaaaccggggcggcgatcttcgattccgcccagtcgttcgccatgatccgcggcggccacgtcgacctgaccgttcttggcgcctttgaggtcgacgtcgcgggcaacatcgcctcatggatgatccctggaaaaatggtcaaggggatgggcggcgccatggacctggtggccggcgcgcagaacatcatcgtggtgatgacccacgcctcaaaaaacggcgaatccaaactgctgccgcagtgcaccctgccgctcaccggcgtggcctgtattcgccgggtactcaccgatctggccctgctggagattgtcgacggcgcgtttgtcctgcgcgaagtggccccgggggtcagccccgacgaggtgatacgtaaaacggcgggacggctgatcgtcgccgacgacgtgcgcgaaatgcgcttcagttaaggagagaccatgaccgatattgccattgttgctgcagtacgcaccccggtaggcagctttcacggcgccttcgcccctctttccgccgtcgacctcggcgcggcggtggtgcgcggcctgcttgaacgctgccagctgcctgccgcagcggtcgacgaactaattttcggccaggtgcttaccgccggctgcgggcagaacccggcgcgccagaccgcgctgcgggccggcctgccggtcgacactccggcggtcaccgtcaatctggtctgcggctccggactgaaagcggttcagcaggcggtgcaggcgatccgctgcggcgacgccgggatcgttatcgccggcggccaggagagcatgagcaatgctccctatctgatgcatggcgcccgcgacggcctgcgtttcggccacgccagcctgcaggacagcatgatccaggacggcctgtgggacgccttcaacgactaccacatgggcattaccgccgagaacctcgccgacgccttcgacatcagccgcgagcgccaggacgccttcgccgccagctcccagcgcaaagcggcggctgctatcgccgccgggcgctttcgcgaggagatcgtcccggtcagcgtcccgcagggcaaaaagccgccgcgagtcgtgactgacgatgagcaaccgcgcccggagaccagcgagcagcagttggcccagctgcgcccggcgtttcgcccggctgacggcagcgtcaccgccgggaatgcctcgtcgctgaacgacggcgccgcggcggtcctgctgatgcgcgtcgataaagcgcgcgagcttgggctgccggtgctggcgcgcattgtcagctcagcggtcgccggggtcgacccatcggtgatgggcattggcccggtgagcgcctgccgccaggcgctgcatcgcgccggctggacgctggacgaggtggaccttatcgaagccaacgaggcttttgccgtccaggcgctggccgtcggtcagctgcttgagtgggatagcgagaaggtcaacgtcaacggcggcgccatcgcccttggacatcccatcggcgcctccggctgccggatcctcgtcagcctggtgcatgagatgcagcgccggggcgccagcaaagggcttgccaccctgtgcgtcggcggcggccagggcatcgccatgactctacaacgttaacaggagccactatgtttacaccacgcctggcggtactcggcgcgggactgatgggcgtcggtatcgcctgccatttcgcccgtcacggtcacgccgtccgcctgtatgacaccgacccgcagcgtctcgccgaggttccggcagtggccagcgccatcctgtgcgagctggaggccagcagtcaacaggatcccgccgaccgcgacgcggtgctggcccgtctgacccccaccccgacgctgaatgccctggccgatgccacgctgctgattgaagcgatccccgaacggctggcgctgaagcacgccctgtacgccgagctggaaacgctgatcgccgacgaggcgattatcgccagcaacaccagcggcctgccgccggatcggctggcgcagggcatgcgcctcccggaacggctactgatcgctcatttctggcatccgccgcacctgatcccgctggtggaagtggtgcccgggagcgccacgctgcctcatctggcacgccaggtgagcgacttttgcgccgcctgcgcgctggaggcggtggtgctcaaccgcgccgcgccgggctttgtcggcaaccggctgcagttcgccctgctgcgcgaagcgttgcatatcgtccacagcggcatcgcttccccggaggtggtggaccaggtgatgcgcgcctcgctgggccgccgctatgcgatggtcggcccgctggaggctgcggacatgaccggcctggcgacagtccaggatatctgccagcacctgctgccggagctggccagcggcacggagatgatgtcgctggtggcggagaaagtggcgcgaggcgacaccggcgcccgcagcgggcaaggcttttaccgctgggacgaagcccggcaccaacgcatccagtcgcgccgggaacaccagctgcgcttcgccctgaaaccctagtatcgcgttctgtacccctacaataacaatgagagtgagacgtcgtgatgagtgtgataatagccctggccgcgctggcgttactgatgctggcagcctaccgtggatacagcgtgatcctctttgcgccgatcgccgccctcggcgcggtgctcctcaccgacccgggcgcggtcggcccggcctttaccggcctgtttatggaaaaaatggtcggctttgtgaagctctatttcccggtgtttctgctgggcgcggtattcggcaagctgattgagctgtcgggattctctcgttcgattgtcgccgccgccatccgcatccttgggcgccgccacgcgatcccggtgatcgtgctggtgtgcgccctgctgacctacggcggggtgtcgctgtttgtggtggcctttgccgtctaccctttcgccgccgaactatttcgccagagcgggatccccaaacggctgatccccgccaccgtcgccctcggggcattctcgtttaccatggacgccctgcccggcacgccgcagatccagaatattattcccaccagcttcttcggcaccaacgcctgggcggccccctggctggggcttatcggctcgctgttcattatcatcttcggtttgctgtggctggagcgtcagcgccgcaaagcgcaggcccgcggcgaaggctatgggaccgacctgcaaaatgagccggagaccccggatgacatcgatctgccgcatccgctaatcgctatcgccccgctgctgctggtgggggtgctgaatctgctgttcacccactggatcccgcagtggtatggcgccagccatgagctcaccctgccgggtctggcgaagcctgtcgtcaccgaagtggggaaaatcaccgccatctgggcggtgcaggcggcgctgctctccggcattgtgctggtgctggtttgcggctatcgcaatatccgcggccggctggcggagggaagtcggacggcggtgggcggggctattctcgcggcgatgaacaccgcctctgagtatggcttcggcgcggttatcgccgccctgccgggtttcctggtgctgtcaaaagccctcgcggccattcccaatccgctgttaaacgaggcgatcagcgtcacggtgctggccgggatcactggctcggcctccggggggatgagcatcgcccttgcggcgatgtccgagacctttgtcgccgccgcccacgccgccaatattccgctcgaggtactgcaccgtgtcgccgccatggccagcggcggcatggacaccctgccgcacaacggggcggtgatcaccctgctggcgatcaccggcctgagccatcgccaggcctacggcggcattttcgccatcacggtgatcaaaagcctcgcggtactgtttgtcattgccacgttctatgtgaccggcattgtctgataccagattgaaggagtaatacaatgaacttacacggtaaaacggcgctggtcaccggctccaccagcggcatcggtttagggatcgccaaagtgcttgcgcaggcaggcgcccagctggtgctcaatggcttcggcgacagcagccacgcccgggctgaagtcgccgcgctgggcaagatccccggctatcacgacgccgacctgcgcgacgtcgggcagatcgaggcgatgatgcactatgccgaaagcaccttcggcggcgtcgatatcgtgatcaataacgccggcatccagcacgtggccccggtggagcagttcccggtggacaaatggaacgatattctcgccatcaatctctccagcgtcttccacaccacccgcctggcgctgccgggtatgcgccagcgcaactgggggcgcatcatcaacattgcctcagtgcatggcctggtggcgtcgaaagagaaatcggcctacgtcgccgccaagcacgcggtggtcgggctgaccaaaaccgtggccctggaaaccgcgcgcagcggcatcacctgcaacgccatctgcccgggctgggtgctaaccccgctggtgcagcagcagatcgataagcgcatcgccgagggggtcgacccggagcaggccagcgcccagctgctggcggaaaaacagccctccggggagtttgtcaccccgcaacagctgggcgaaatggcgctgtttctgtgcagcgacgccgccgcccaggtgcgcggcgccgcatggaacatggatggcggctgggtggcgcagtaagccgctggcgccgcgaagatcagaacatcgccagaaagcgtttcaccgtacgcgagcgctcgaagcgccgccaggcgatggcgatatcggtcttcagcggcgccccgctaagcgggtgatagctgacgttcggctgctggatgcaggtcatcgactgcggaaccagcgcgaagccgaagcctgcattgaccatgctcagcgacgatgaaatttgcgacgactgccaggcgcgctccatatcgatcccggcgcgcaggcaactgttatacaccagctcatacagcccgggggccacctcccgcgggaagaggatcggcgccacgtcgcgcagctgctccagggcaagggtcggctgcgtcgccagcggattatcgcgcggcagcgcgataaccatcggctcctcatcgataatccgcagattaaaggctttactgctctcgcacggcaggcggacgaaggcgatatccagctcggcctcgctcagggcggtcatcagattggccatattgtcttccatctggtgcagggtcaccccggggtggtcgagctgaaaacggtgcagcagcgtgaagatttgcggatggaaagcatcagaactggtaatgcctagcgacaggctgccgttcatcccgcgcgcaatgcccttggccttctccagcgccgcatcgctcatggcgaggatctggcgggcatcctcatagaaagactctcccgcttccgtcagctccaccccgcgggttaaacgccggaacagcggggtccccacttcgcgctcaagccgctgaatttgctgacttaacggaggctgtgaaatacccagctccttggcggcctgggtgaagtgccgcgtcctggcgacggcgacaaaatagcgaagataacgaagttccatatcgaaaacgtctcaaaccagcatggtttctatattggaactgtgagctgaatcgggtcaacatttatttaacctttcttatatttgttgaacgaggaagtggtatatgaatcattctgctgaatgcacctgcgaagagagtctatgcgaaaccctgcgggcgttttccgcgcagcatcccgagagcgtgctctatcagacatcgctcatgagcgccctgctgagcggggtttacgaaggcagcaccaccatcgcggacctgctgaaacacggcgatttcggcctcggcacctttaatgagctggacggggagctgatcgccttcagcagtcaggtctatcagctgcgcgccgacggcagcgcgcgcaaagcccagccggagcagaaaacgccgttcgcggtgatgacctggttccagccgcagtaccggaaaacctttgaccatccggtgagccgccagcaactgcacgaggtgatcgaccagcaaatcccctctgacaacctgttctgcgccctgcgcatcgacggccatttccgccatgcccatacccgcaccgtgccgcgccagacaccgccgtaccgggcgatgaccgacgtcctcgacgatcagccggtgttccgctttaaccagcgcgaaggggtgctggtcggcttccggaccccgcagcatatgcaggggatcaacgtcgccgggtatcacgagcattttattaccgatgaccgcaaaggcggcggtcacctgctggattaccagctcgaccacggggtgctgaccttcggcgaaattcacaagctgatgatcgacctgcccgccgacagcgcgttcctgcaggctaatctgcatcccgataatctcgatgccgccatccgttccgtagaaagttaagggggtcacatggacaaacagtatccggtacgccagtgggcgcacggcgccgatctcgtcgtcagtcagctggaagctcagggggtacgccaggtgttcggcatccccggcgccaaaatcgacaaggtcttcgattcactgctggattcctccattcgcattattccggtacgccacgaagccaacgccgcatttatggccgccgccgtcggacgtattaccggcaaagcgggcgtggcgctggtcacctccggtccgggttgttctaacctgatcaccggcatggccaccgcgaacagcgaaggcgacccggtggtggccctgggcggcgcggtaaaacgcgccgataaagccaaacaggtccatcagagtatggatacggtggcgatgttcagcccggtaaccaaatacgccgtcgaggtgacggcgccggatgcgctggcggaagtggtctccaacgccttccgcgccgccgagcagggccggccgggcagctcgttcgttagcctgccgcaggatgtggtcgatggcccggtcagcggcaaagtgctgccggccagcggggccccgcagatgggcgccgcgccggatgatgccatcgaccaggtggcgaagcttatcgcccaggcgaagaacccgatcttcctgctcggcctgatggccagccagccggaaaacagcaaggcgctgcgccgtttgctggagaccagccatattccagtcaccagcacctatcaggccgccggagcggtgaatcaggataacttctctcgcttcgccggccgggttgggctgtttaacaaccaggccggggaccgtctgctgcagctcgccgacctggtgatctgcatcggctacagcccggtggaatacgaaccggcgatgtggaacagcggcaacgcgacgctggtgcacatcgacgtgctgcccgcctatgaagagcgcaactataccccggatgtcgagctggtgggcgatatcgccggcactctcaacaagctggcgcaaaatatcgatcatcggctggtgctctccccgcaggcggcggagatcctccgcgaccgccagcaccagcgcgagctgctggaccgccgcggcgcgcagctcaaccagtttgccctgcatcccctgcgcatcgttcgcgccatgcaggatatcgtcaacagcgacgtcacgttgaccgtggacatgggcagcttccatatctggattgcccgctacctgtacagcttccgcgcccgtcaggtgatgatctccaacggccagcagaccatgggcgtcgccctgccctgggccatcggcgcctggctggtcaatcctgagcgcaaagtggtctccgtctccggcgacggcggcttcctgcagtcgagcatggagctggagaccgccgtccgtctgaaagccaacgtactgcacctgatctgggtcgataacggctacaacatggtggccattcaggaagagaaaaaataccagcgcctgtccggcgtcgagttcgggccgatggattttaaagcctatgccgaatccttcggcgcgaaagggtttgccgtggaaagcgccgaggcgctggagccaaccctgcgcgcggcgatggacgtcgacggcccggcggtagtggccatcccggtagattatcgcgataacccgctgctgatgggccagctgcatctgagtcagattctgtaagtcatcacaataaggaaaggaaaatgaaaaaagtcgcacttgttaccggcgccggccaggggattggtaaagctatcgcccttcgtctggtgaaggatggatttgccgtggccattgccgattataacgacaccaccgccaaagcggtcgcctccgaaatcaaccaggccggcggccgcgccatggcggtgaaagtggatgtctccgaccgcgatcaggtgtttgccgccgtcgaacaggcgcgcaaaacgctgggcggcttcgacgtcatcgtcaacaacgccggcgtggcgccgtccacgccgatcgagtccattaccccggagattgtcgataaagtctacaacatcaacgttaaaggggtgatctggggcattcaggcggcggtcgaggcctttaagaaagagggtcacggcgggaaaatcatcaacgcctgttcccaggccggccacgtcggcaacccggagctggcggtatatagctcgagtaaattcgccgtacgcggcttaacccagaccgccgctcgcgacctcgcgccgctgggcatcacagtcaacggctactgcccggggattgtcaaaacgccaatgtgggccgaaattgaccgccaggtgtccgaagccgccggtaaaccgctgggttacggtaccgccgagttcgccaaacgcatcaccctcggccgcctgtccgagccggaagatgtcgccgcctgcgtctcctatcttgccagcccggattctgattatatgaccggtcagtcattgctgatcgacggcgggatggtgtttaactaataaaaaaagctctgacatggcttgcccctgctttcgcgcaggggctttttttggtttgggtgtaagtgtaagcatcccggagaaacgaagcatcgatatttgagggcttctggcgttctcacttacgcttcgacacgacgtgggcaatctgactgggatgaaggtctgatttgagcgaggagcggaagttcgggaacgggatagctccattgatgactttatgctacgtgttaaaccacaggtaatggagttgctgccggagaaagtagtattctttagactgagatcttttgaaaggaactgtagttgctataaaattgaggaaccaaattttttagcttttaaaaaataaaatattatctcttttagaaattagataagcaggagaaaagctatgatatcgataataaaggacctatttagtaaccaagtgggttccgcagtcattcttactatcattggagcgattacaaaaaagtatattcagtttcatcgcagagactttttttcacgctcatcctccgagcagataaaagcagtcgaatggcttagaacctcttctgtacccatctccgatccgttagcaaaggcggaacagcagttccgcctacagtcgttcggactgcatagagattggcatttatcttataaaatcatatgcttgagttccgattatgcacagtcattgattccgtccttgaaggcagtcttgcgttatcagggcatgtacacaattactaacgggaatatataccctcataaattccataagtggataataccttttgtgttaatatcgttgctattatatatcggtgctgagatatacagaggttcttcacagagtgatggtatagagattttgaaatctctatacgtcgttattgtggcttttatagtatggtgttgggtcgctgcttgtgctctgagagtatcaagcatcagtaaaaagctcaatgcctatatcccacccgcaaacgattttaaatccaagacatacgatttcagttcaatactcaataatagatatccctagcctggctgatctgcttcccgtaaatactgatacctggcagtaagcgagatccgcttctggcacggcgcgaactgttaactgagccaaaggtccgccatgagcgaggagcggacatttttcttcgtcctctacttcgtccattctttatgcagtaacgcatagatgtatgtgtcgtcataccttgccttaccctcctcgttttcaaaggagacaaattctttaaaacatccttcacgtcgcataagtagtcgctcgcatagtttttgagaggagtaattataatcttccacccaggcatacaaacgtctggcgccttttactttaaataaataatcaaacagtgcagcaactgactcgcttgcatatccctgatgttcaaaacgttgattaaaatgccagcctactgaccaggtattgttgtctggttcgttgctattgtccgcaaaaagatgtccgattaacgtatcggtttcttttagacaaacggcaaactgtgttgggtcagaggctcgtttagccacgtcgacctctgcctcagcgagtgaatgtaacttttcatccttaaagcaaggagtacgtggtgaagagaggtaattgaaaagagctgccgcatcctcttccttaaaatggcgaatgattaatctttgagtggtaatgatggtcataatgtccttgataatgtaatgtcagccagttcagcaagaagtctgctttaaactggccggaacacagggcagagattagccgttccggctattccccagtctgtattttcgcatgcctgtaaatcgtgtgatcgtcacgaaaaataccggaacaaagaaaatggccagtagcgttccgctaatcatcccgccgaatacaccggtaccaatcgcatgctgcgtgctgtcgctggctccactggcaagcatcagcggaacaacacctaatgtgaaagctagagaagtcatcagaattggccgtaagcgtagctttgcagccgtcaatgtcgcgtcaataaggctctttccttctttcatcaattgtctcgcgaactcgataatcagaatcgcattcttggcggaaagtccaatcagggttatcagacccactttgaaaaagacgtcattcgtcatatttgtaacggatacggccagcacagcgccgagcagccccagaggaacaacgagcatgaccgcgaagggaatggaccagctttcgtaaagagcagccagcaccatgaataccaccagtaccgagagcacaataagacccggaagctgtgatgcagactctttttcctgtaacgaacttcccgcccactccccggcgaaccccggtggtaagtgcttagccagattgtccattgccgccattgcggtacctgacgattttccctgtgcggaactcccggttatgcgtatggcaggatatccctgatagcgtatcagttgctgcggtgcaacattccacgaaagcgtcacaaaagcggataatggaagcatctgccccagacggtttttaacagacaaagccaaaagttgttcaggctgcatccggtatggcgcatccgcctggacgataacctgctgaacccgaccattattggtatagtcattaacataattggaacctgctgcaacggaaatggtttgatttatttcatcaaacgaaacccccatggcttccgctttttccctgtcgacatgcagggaaaggcttgttccctcaccaagtccatcaatatagacatcggcaaggtgaggattatgatttgcctgtacaataagctcatcggccgcctttttgagtgcctgatagcctttcccccctctgtcctgtaaataataagtgaacccggatgaggttcccatatcagaaatagccggaggcagcagactcatcgttacggcgtcaggcacgtttgccatttgggactgaatatggtcagcttcttcctgtgccgtggttcctttgcgttgtttccagtccttgagggtggtgaatgccatggccgaattttggcctgatcctgagaaaccaaatcccagaatcataatgttactttctaccgcctgccgatgggcgatctcctcttcaaatgtatcgacgaccttaagcgtccgctgcatcgtggcatcagaaggaagctggattgaggacataaaataaccctgatcttcatcgggtaaaaatgatgatggtaaggtggacagcccggcaaacaatgccaaacataatgcagcgtaaatcatcatcatacggccagtacgcttcagtacaaatcccagaccagtggcgtaaaacgaagtcaggcgatgaaagtgagcgttaaaccacgctgaaaatacgctgcttttaccctgatgaataccatgtggtttgagcagggttgcacaaagcgcaggcgttaacgtcagcgccaggaatgccgacagtaaaatggatatcgccatcgaaatgctgaactgtcgataaataatacccacagaaccgctggcaaaggccattggtataaacaccgcagtgagcaccagcgtaataccaatgattgccggcgtaatttcacgcatcgcttctcgcgttgcatcctgtggagacatttttttgtcttccatcagtcgttcgacgttctccaccacaacaatagcatcgtcaacaataatcccgatggccagtatcattccaaacatggttaaaatattgatggaataaccgcttaatagcattacggtaaatgtgccgagcagcgccacgggtgccacaatcgcaggaataagcgtacagcgtatcttgtgaaggaaaagcagcatcacgaaaaagaccagaaccatggcttcaacaaatgtctcaactaccttcaatatcgatagctttacaaatggagccgtatcgaaaggcacggtgaatgtcattccctcgggaagcacaccggacagttctgttaaccgcgcgcggatacccgacgcagtactaatcgcatttgcgccaggagacaactgaatggcggcagccgttgcaggcacgccattttcacggatgccaaatgcgtaactttgcaacccggattccacgcgggcaacgtctgccagtgtcacccgggcggctgagacctgtgatttaatcgtgatattgcgaaattcttcaaccgaagagagctgcccttttaccgttattggataggtcacctcttgactgctcgtcgcgggttcatctccggttctgcccggtgaaacaatcacgttttgttgactgatggcgcttaatacatccgtaacagagagcccatagctgtgtaatttcatcgggtccagccatatgcggagtgccttttctccgccaaaaagctggactttacctacaccaggtacgcgacggagttcatcagtaacattccttgcaaaataatcgcttaagtcagcttcctgataggctccgcttggcgattttaaccccaccatcattaaaaaaccggaattagctgcctcaacatttatcccattctgtcttaccgactgcggcaggcgagattccacaattttaatttggttttgcagatccatctgggcgagtttgatgtcggtaccgggtttgaaagttaccgtaattgacgccatccctgtcgtgtcactggaagattcaaaatagagtaaattgtcaacactcgaaatttcacgctcgatcagagacacgacggatgtgttcatcacttccgggctggctccagggtaactcactgaaatgataataccgggtggcgcaacttcagggtattgcgcaaccggtaaacgaggtatggaaaacagtcccgtcagaacaataaacagggcaataacccatgcgaagatggggcgctcaatgaaaaagtgcggcatcaggtgtacttccagtcaacatacaaagggtaaaagttcagcatggttttcctgataaagaggtctcatcgtcagtcgaaacccgtttaccgatatccctgagctgggaaaatttctcaagaagttgtggtgcgtcatcaaggcttgttgcaaacatccacatataggtcatgacggaataaatatgtccggcattaattccggattccatgctcatcctgataatggtcatggaaaagagagcagaaaccagaaggcctattgataaatatccccatgcctctctgtcggataacaccacgcgcaaacgggcaagtgtgtcataatgtcgcttaagagcaccaaaagacgccttattaacataatcgacctctttctcaaggcgattattcagccgtctgtagaatgtctcatttttgctggcatagcttgagacaaaacacatcagtattgccacgatgatcaaacaggctatacctgtccagaattcaatccataacagcataattgctgcgccgaaaagggaaatgatcgaggtgatcaatacgggcaggtgcaactcgaagaaatctacaaattcacgtgatagagtgactctcgcagcaatagtcgagtgattaagtgaatattttcgctgggataatactacagtcacagcaagacttgcgtagatacgtgcaaacgttcgcgtatcgacactacgtctggcggctcccatgcaccacatgaacagaaccatcaggccataaagagccgcatgtgacgtctgtccgcccaggatggcatttatcgccatgcccgccagaacggggtagagcaggaatgcaacgttttcagcaataaccagcatgaaagtaatgcacaatttctttctgtgccgccaggcaagtctcttaagtgagatagcaaccccgggggccataggtttgtcgttgcctttataaatcatgataaattatattaaacatctgtgtgtaaagggttctgcagttggtttattatgtcagctaagtgaaacgagacagcagaacagagcagtcataaatccatgtgctaagtgtaacgtgatgatgtcaatcgtgaatggatgttttatggaggatatgtgtactcactcctgaggttatgtatcatattgaaattgcataatatcaaaccattcttatacataaacataaaggtagtccgcaaaagaaaaccattaaaaaaaattcataataaaaaacaaaatcatagatatctggaaaagtattcaaaagcagatgtaatacaatgatggtgtgtataaacactaaaaccagaccgaatgttattgcaatgaagtttttaaaaactccaggttttttctgaataataaatgataatgctgtaatgattatcaaaacacgaatcagtaaagatgagggtaatgttgattctactttttcattaattgaatgcacaaggtaaagccaggtagatagcaacccatatgaaacgatgcaaaataaaagtgaggccatcaaattctcgcgccggaaaaaacatttagtcagcaccataaaactccttagacaaagtacatattgcatgcaccacttaacctggttgtagattatcacttagcgatgttgattaattatttataaaatgtgtagtgaatatggagagtgagtctggtaaaattttaagaaaatttcttgatgaacttttccaaaaagtacctgtcaaaagacatcaaattgaaaattaatgtttgtaattgagttaaagagctttaagcatgacgataaaagtgctttcagggtaaaatgcatgttgtcatcagcactgtggaagaaaatatgaacaacaacaatctgattatcgtcgcagaagacgatgatgacatcgctgccatactgacaggctatttacgtaaggcaggtatgaaaaccttaagagccgaagacggtgagcaggcaatcaatcttacccgtctgaacaagcctgatctcctgctattggacatccacctgcccgtgtacgatggctggaatgttctcaccacgttaagaaaggaaacgaatgtaccggtcatcatggtgacagcactggatcaagacgttgataaactgatggggctacggctcggggctgacgactatgtgataaaacccttcaatccatctgaggttattgcccgggttgaagctgtgcttcgcagaaccagaccggttgcagagtctacacattcacggcctttaagaacgccttttttaacgatttatcctgatgagttttacgttgaaatcactgcacaaggtgaggtttccacgccagtattaaccaccactgagtttaagcttttaacctatttggcgagaaacccgagaaaagtctgttcacgtgaagagttactcgatgcgtgtttacctgagggagactcgctggatcgtactgtagacagtcatatgagtaaacttcggaaaaagcttgaacatgccggattgaagggcattccggaaagcatccgaggattaggctaccggttgggtgacaaaaaatgaacaaagaaacgattctgagccgtcagattttgacatatatgttgttgttaacgtttgttattattgccattgcaatactcggttcctacctattttatagtttcctgatttattacctgccgggtggaatgaacgaaggtagtgaagatgctatgacattccttgactggatgtggattctgatggcgtccattacctgtctggtcgttgcacttttctttaccgtaaagctgtctgcaagaatattcaacccactgaatgacgttgcatacagcctgaaacaaatctctcagggaaaccttagtgccagagcatttaacagcagttctaagttgggagagatgaataggctcgtcaatgactttaatgagatggctgaaaagttacagacgctggatgcgcagcgaaatttatggaatgctgcaattgctcatgaactccggacgccggtgactatcttacgtgggaggcttcagggactggttgacggcgttttcgaaccagaaccgtcgttattcagaaaccttcttaaacaaactgaaggtctgaccaacttaattgaagatctccgcgtcgtgagttcttcaggaggcgcagggtactccttgatgctgagtgaagtggatctcaaggccacgatttcaaatgcgcttgataccttttggccggactttgataaaaagcatttcaaaattgtcactgagattaaccagcagtattgcgtttgcgatcccttacgcattattcagtgcctcaccgttctttttgacaatgccttaaaatattccacatcacaaacgctgttaataaagaatggtattacaggaaacgataattttattatcgttcaggaccaaggacctggaattcctgaagaactccagaagtccttattccagccttttcagcgaggagaatacgccaaaaatattaatccagagggctgtggtttagggttgtcggtagttaaagccattatgtgcgcccacggtggagacgttagctatagtttaacaccagaaaatggctcacttttcaaactctcatggcctgtttaagggcatgaatacacaggctcgatcgaacctgttttagcaagagacagatcccacatactgccgagttttgcgtcccaaattgatggagtgattttaagtttgcctcttttggggcttaatgttatttcgctgaaatagatatcatctccttttagcataagatcgacgcggcagtagtctatttcttttgctaagtcctgggcggcaataacggatttatgaaatgattctggttcatcaaccggcaatggcgtgtttgggtattccatctgaaagggttgtaaattccacgctctgtcataaacgttaatgaattcgtttccatcgctgtcagtaaagtcggcctcgataaaacatgccacaccgtgaaagcaatgtattcttatcatttccggagttatattccggtgtttactggaaaatagatccagatacatttcgcataggatcacgggtggtatgtttttatactgccattctcgggtcgtataatacatgttctttttaagagatagttttaatttgcttttaaccttagcgggatcaatattcgttttatccgtgcatatgaccgcgctaccactatcatgattgcatttcaaaacaaattttgagggaagtttgtcgaaatcaatatcatcaactctattataaacacctactaaaggaataagcttaattaaattagggaaggtgcgaacaagttcctgatatgagatcatcatattcatccggagcgcatcccagagggacatcatgagccatcaactcaccttcgccgatagtgaattcagcactaagcgccgtcagacccgaaaagagattttcctctcccgcatggagcagattctgccatggcaaaacatggtggaagtcatcgagccgttttatcccaaggcgggcaatggccgacggccctatccgctggagaccatgctgcgtattcactgcatgcagcattggtacaacctgagcgacggtgccatggaagatgccctgtacgaaatcgcctccatgcgcctgtttgcccgattatccctggatagcgccctgccggatcgcaccaccatcatgaatttccgccacctgctcgagcagcatcaactggcccgtcaattgttcaagaccatcaatcgctggctggccgaagcaggcgtcatgatgacccaaggcactttggtggatgccaccatcattgaggcacccagctctaccaagaacaaagagcagcaacgcgatccggagatgcatcagaccaagaaaggcaatcagtggcactttggcatgaaggcccacattggtgtcgatgccaagagtggcctgacccacagcctagtcaccaccgcggccaacgagcatgacctcaatcagctgggtaatctgcttcatggagaggagcaatttgtctcagccgatgccggctaccaaggagcgccacagcgcgaggagctggccgaggtggatgtggactggctgatcgccgagcgtcccggcaaggtaaaaaccttgaagcagcatccgcgcaagaacaaaacggccatcaacatcgaatacatgaaagccagcatccgtgccagggtggagcacccgtttcgcatcatcaagcggcagttcggcttcgtgaaagccagatacaaagggctgctgaaaaacgataaccaactggcgatgttattcaccctggccaacctgtttcgggtggaccaaatgatacgtcagtgggagagatctcagtaaaaaccggaaataacgccagaaatggtggaaaaaatagcctaaataggctgattcgatgtgtttgcgggaaaaaaatcggcccagatccgcgaaattttaatcagcgagtcagcttgggaagaaatgacctgcttattcgcaccttccttagtccgtttctcaacatactgcctgaccagaagtttatcagcaagcaatgtataaaatgggttgtggataaataaaatgcgatggcaaattttctcattaagcgttacagggttgagtaaatccggatatgtgccagatatttctcttaacctgtctgcatgaaatgaaatgtcattagtcaaaattgttctgcattttcttaacaaatattcaatgtatttgatttgatagtttattttgttcataacgcctccggttcagaaaggaaattctgacagaggtttgttgatttattttttgcaaattatggagagtatatggaccgacttgcttctttattaacagaaattaatccggaccattgtccgcgccttgcacgaatcggaaaagttaactgcactgaagatccgctctgaacgaagagcggatcttcagtgcaaaagaacagcaaggcccgcctttattattaataatgccttatctacaactgctgagttacccagctaccattttcagcgaaaaataccgtcgcatcggctccattgaccagggatatttgaggaggtatgtggccaatatcaacatcatacagtacgggcacggcaatattctcaaaagcggctttaagggcatccagataattatgtttagtcgggtcgcttacgtcgggtgcagcacttctgccgataagaacaccatttaagttatcaaaccaaccctgtaatcgtaagctaaataatgcgcgtgttaattcatagggagccatttccacgttttcaaaatagaggattattccttgagggctattgctcgccttgaacaagggcacattcccgaatggtgtacctgctaacctggatattatttcgaggcagccgccgatcagtttcccgctaaatgtcagagaagatgtaacaccatcaaggcgtttccactgtgttttttgggtcagattgaaacctccgtctgacgctgttccccattgattttcatccgcttgaaatgctgttgaagagtactgtttgattacagttccccgattcgattccagaatttcccatacggcctgagtggtggcatctaacttttgagcgccaagatccatgaggtttggcccatgcaaagtagcccagcccgatatcgtcgtcagtgggaaatgaagtgtactcagatctgaaaagcccacaaaccattttggtttagaccgggacaacagatcaaaatcaatcaaatcaagcaattccatcgccagatcaccgccccaaggtggcataacagcttttatatctgggtcagtaagataagacattaattcttcaacgcgggaaaatttagtggcgcttttatttttgtgctgcgagcgtaagcagcgtccttcgcggacctggtaacctcttttctttaggttttttatggcgagttccagtctgggatgcagatgttcaggtacgccagcagagggagcggttacaccaataacatctcctggagccagcctgggtggaaagaggacactcatggatagatccttttcagaacatatagaattccataatctataaataaagccaggatgtaaaattaacaggcgaacactccgcttgttttttctatgagcctttaaaaggtctgctcatggcacccaagggactttaccggcgtagatgatgcgtcaggcgactaatcctcaaaagtgcttactgcttattcgcgggaccgccggttgatttgggttggctcatgacgactactcttttagctattcccggtttccccttttcaaagcgccatttactcatcattttctcgatgattttatgttcaaactccggagtcgttgtcgattccagtatctttacattctgaactctgccatctgaatcaacatcatactgaatccgcagagcattcggcaggaggtttccgttcttatcatgagtggtaattgctgcgtttgcagaggaaatgctgcctgaaggtgtgctggcgctggccggtataccggcgcagagtgccaggaacaatggcagaatcagggtgaatagtctgatagcttgcataaatcgtccgaattccaaaattaaccatgaatcttcacgttaccaacggcgcgagtgacaggctaccagatgaaatgatcagtgaataccgcgtcttcagcggcaatcccttggacctacttaccaggcgcttcgtaccacatccattcccggggtcgtttcgctatcaggactagtgggagctgagcgagtatatcaacgattcttttgccagctgccagcagcgctatccggttcgtcggggaacatgaccgagctaacaccctcaagtgattagcatttattcgcgtcccgcgctgaagacgttcagctaatcctttttgacttctgtgttcgggatctaccgcggttgcgacgttaagagggtgttctccgcgggcttagcggcagcttgctgctgatgctaagggggagattcttcagtcatttctgcgacaccggggaacttaacccggaagcggctgaacatagcgccagcagggaggatcccggatagctgtgcgtgacgccttatcccggctacgctgttgtgccgctcttgtggcgtatttttgccgggtggcggctgcgccttacccggcctacaaaaactcgctagctgactgactggctcgcgccgcgttgagtgttacatagtgatgccatctcttcctgctcctggcattgagcggacaaaccagatgagccaaaggtccgccatgagcgaggagcggaaatttgccacgcccacaactacgttactaacattgaggtgtcgtaatcaacggagagcaggtcaaagtcattttagctgcatcaagggataagagttcgtggtactggaaccgtcagtatagagctcggtaataattatttttttaccatcaatagaatatttgactgtactgtccgcaggatcatcccgccagcgaccggtgatgtcagggttatcagatgcccacataacctgatcacctataagtttacactttattgcccaacgggtgccatcgttctgtcggatataatgtacgtaggcaatacctgattccactttatccagttgcatgatcttatggtcacggccaaacatcgcagcagaagccgccttgcaaatctgacctaccgtgacttcagaagcctgtaccggcgcagtaaacaccagtggaacaagaagtgaaagttttttcattcggctcaatccattttgtttattttcaggaataacgctaaatgtatatgtcggcaatctaaagcgtttcttgacgctaatctagtgttgcgatggcaggattgattaacttagtccctagcgtaatctcatgctctgcctgattgccagcttggctcctttggcacactccacattgcgattcatacagaatgttgttagccacttccacacttgagcacagaagaaattcatgctcagcaaggtccgggcggtgcaaagagcggacgttaattttgaagcttttaagatctacctgcagtggtaactgggcatattgatcattgcgattagacagcgaaccactatcccaggagatttatagacatttccatgcagcgcagttcagcctgcgccaaggcagagggatacatgctttcctgcataagtttgaaaccatgtttctcataaaaagtctgggcattaggtgttgaggacaaagtcaattgctcaaaaccacgtccacgagcttcacttttgatggcttcaataatctgactacctaaacctttacctgtatattgaggtagcgtaaatacagcctcaatacttcctgtagatagatcaagatagcctgtagctaacagtctgccatcaggggcagcaacaacgaaaaaaggattcaccacaatggcgttcctgtagctctcaggcattttttccggtgtccaggctgcaataaccgcatcatcataactactcttacatccgtaacgtatagcctgatttcgaatgttccagcattcttctgcctccacaggcacagcaagtctgatcttcataccttttccttgtacgttttattctgcgaaccatttacatctaccataaaaattctaaagcatacccatcaaatttgagtgaggcggcaacgtccgctcctggcacacagcagacatgaaattctggaatagcattcgtacacttacaacatcgagaggcttctgaaagccgcgtcagcggcatgacagcgccagcagagaaaatcccggatggcggcgcatggcgcctaatccgggctacgctgttgtgccgttattctgcctggtgacagctacgccttacccggcccggtgatttggcgctcaattcgcgcccttcgtaggcccgcgcaagcgtagcgccgccgggcaagggcagcgggtgcggagccgcttttgtgccgggtggcggctgcgacttacccggcctacggtccgtgcgacttgtcgttaatttattcaccattgttgctgaaactgccggtgttgcggcctcaaaatcgctgagacgttcggggcagcccgcatggatgcgggctgagggccgtgttttgcacggacgctgcctcggtccgacccgaagcctgcagggataagtcgaaggcaccacgaagtggcgattttgcttgccggagcccgggggtacagggggcggcggcgactggccgccccctgtgcgctccctgcgccatgccaggcataacgcagaagattaaccgggagcgcaaaatacgctgaagccacagataacataaaagacttcccggcagtgctttccctcacccaggccttcttccggagggagagagaaccgtacggcattcgttgccgttccatgacgctccctgcgccacggagaaccaggtgcagcaccacgaagcgggagcacagagtacgctgaagtcacgcgtgagaaacgctttcccgggctgagaaccaggaaaccgataatagtctccaccaccgccggcaagaaatcaggctccgagcccaacatgttgccgggtggcggctggcgccttacccggcctacaaaggctacccgcgatttggcgctctattcgcgcccttcgtaggcccgcgcaagcgtagcgccgccgggcaaggacagcgggcacggagccgattttgtgccgggtggcggctgcgcctgacccggcctacaaaaccagggctgaccgtaccgccctcgcggcagaccccacgttcagcgccgccgggcagttactgcgcctgctgctgcgcttgcgccagctggcggacgatcgccgcgcgccgcgcatccccttccggcagccgggccagtaacgcctgcagggccgccacggcctcggggtaatcttcattgcgcaccgcgctcagggccagcatctccagcaccggcaggctgttcggctgccgctgatgcaggtcgcgcagcagcagctcgcccatccgaacctggccgctatctcccgcccgtaccagcgcgctggcgtaatcgaaagccgccgccggctcgtccgccgccagagcatgcgcccggccaaaggcgccgatcgccgtctcgccatcgtttaacaacaggcccagccgcccaagcagctgccagccggcgaggtcgttcggggtatcctgcaggtggctgcgcaggccaagccgcagctccgccagctcatccattcgcagcggcgccgccgtcgggtccttaacctgctgcaacagcgcaggataatgccgttcagcctgctgccagagcagcacctggccaatatcgctggttttcagatacaggccgagactcaggaccaccagcagcagcgcgcccggaaacaacgcccagcggtttagcggccgttcgccaggcagcggctgcggcgggatatcggtcagcagcgtgcgctgaagctcgacgaccagcgccgggttgtcctcgccgcgctcctgcgccagctcctgcaggcgcgactggtacagggcgcggttgagggcatcgcggtctaccgcccctttgcccgaccacgggaagtacagcagccccagcgcaccagccagcagcagcgcggcgataactaccaacaggctcatcgttcttttccttcttgcaataatgccgccagccgctggcgctcttcgacgctgagcgccgcgtcaggaatgtcgcgacggcgcgcgcgggcgataatcactcccgcgcccgccagcacgaacaaccccggccccagccacagcagcaccgtgcccgcggtcagcggcggctcgtagctgacaaaatgaccgtagcgggccaccatatagtcaacgatctgccctttcgttttcccctgctgcatcagctcgtacaccttctgccgcatatcagcggcaatcatcgcgtttgagtcggcgatgctgttgttctggcatttcgggcagcgcagttgggaggtgatctcgcggaaggcctgctcctgggcctcatccttaaactgccaggtatcgatggcggcccacgtctggccggtcagcatcagcgccagcaggatgactattacacgtctcatcagcccgccctccggttgtattgatcccacagcggctggagctcctcgcgccacacccgttcgttcaggtcgccggcgtgccgccagcggataatgccctgaccgtcgatgagaaacgtctccggcgcgccatagaccccgagatccaggccaagcatgccgttgccgtcgtaaaggctcagcctgtagggattacccaggcgctgcagccagctcatcgccttctggcgatcgtctttgtagttcatccccaccacccgcacgccctgctgcgccaggccgttgagaaactgatgctcggcgcgacaggttggacaccaggtggcccagacattgagcagcagcggcttgccgtcaatcagcgtccgtcggtccagcgtctgaccgggggtattcagcgcttcaaggcgaaattccggcagcggtttgccaatcagcgccgactcgagggtcgtcgggtcatcgccctcggcgttgcgcatcagttgccagaacagcgcggcggccagcgccagaaacagcaccagcgggataaacagtagcttccggttcatgaggcctcctgcagcttcttacgcatccggtagcgcggatcgagcatgcagcacagaccgccgagggccatcagcaccccgccgtaccagatccagcgaacgaacggtttatagtacagacgcaccgcccagctgccgtcgctcagctcttcccccagcgcggcgtacagatcgcgggtcagcccgtcgctgatcgccgcctcggtcatcatcatccggctggcggtgtaaaagcgtttctcggcatacagcgtcgcttccgggcggccgttgcgggtcacggcgataatgccttcgccgccggtccagttggggccgacgatattgcgcacgccgttaaacacaaagtgatagcggtggatatcgatgctgtcgccggggcgcatccgtacatcgcgctccacgctgtagttctggctgaaggtgatgccgataacggtcaccgccacgccgacgtgaccgagcaccatcccccactggctgcgggtcagagtgcgcaggccgcgccagaagccgtggcgatgggtggcccgttcgtgaacctccatcagggcgaagatcagcacccacagggccatcatcaggcctatgaccgccatggcggtgatacggtcctgcagcagccacggcagcgccagagaaagtgacaacgtcaccagcagagcgataatcaggcgcttaatctgcctggcgacgtcatcgcgccgccagcggatcagcggccccagccccagcagcagcgcaaacggcgccatcagggcggtgaacatggtgttaaagaacggctcgccgatggagatgctgccgaggcccagctctttatgcaccagcggcagcagcgttccgaggagcaccaccagcatcgcggccatcagcaagatattgttgccaagcaggaacgactcgcgcgaccacagcgtatgttccacccgcgcccgcacccggcctcccttcagggcgtacagcagcagcgatccgccgatggcgacaatcagcagtaccagaataaacagcccgcgcgacggatccgaggcgaaggcatgcaccgaaaccagcaccccggagcgcaccaggaaggtgcccagcaggcacagggagaaggcggcgatggccagcagcaccgtccaggcgcggaagctgccccgcttttcggtcaccgccagggagtgcagtagcgcggttcccaccagccacggcataaacgaggcgttttccaccgggtcccagaaccaccagccgccccagcccagttcgtagtatgcccacgccgagcccagcacgatgccgagggtgaggaacatccatgccgcctgggtccagggacgcgaccagcgcgcccaggcagtatccagccggcccgccagcagcgaggcgatggcgaaggcgaaagccaccgagaagccgacgtaacccatatagaggatcggcggatggaaaatcatgccgatatcctgcagcagcggattgaggtcgcgaccatcaatggggtactgcggcaggccgcggctgaacggattggaggtgaagaggataaacagcaggaaaccaaaggcgatcatccccatcaccgccagcacccgggcgacggcgtcgagcggcatccggcggctgaagatggcgacggcgaaggtccagacgctgagcagcagaacccacagcagcagcgagccctcgtgcgccccccaggtcgccgctacccgataccacaccggcagcgcgctgttggagttttccgccacatagcggacggtaaagtcattgaccacaaaggcgtgcaccagcagcaggaaggcgccgccgatacaggcgaatagcccacaggccagcggccgcgccagggccatcagccgccgatcctgccgcgccgcgccccacaggggatagacgctcaggagcagcgccagccccgccgccagacacaataaaaagttgcccagttccggcatcatggctgcgcccccgttttctctggcgtcatggcgtttttcacctccggcggcgtgtaattttcatcatgtttggccagcacctgctgggcggtaatatgccgctcgccgtccagtacgccctgggccaccacgccctgcccttcacgaaacaggtccggcagaatgcccttatagctgacgtccaccaccccgcgggcgtcatacagcttaaagcgcacgtcgagggtttgcgggtcgcgctgcagggagcccggctgaacgtagcctcccacccgcagccgctgaccggtatggggcagcgcccgggtttccgttttgccgtagataatttcccccggggtgtagaacagatcgatattgctgctcagggcgtacagcgtcaggctgacggttagcccgaggccggcgagcaccgccagcacgatatacagccgggttttacgacgcgcttgcatccgcggcctccttgtcatgttcgcgagcggcagcgatccgccgctcgcgcgcctgctggcgtcgcacctcatggaacagcgcccgccgcgcccacagggtatgcaccgtcagcaggccaaaggcggcgacggtcacggccaccgccagccagacgtacacggcatagccgcccatattcaggaaggcggcgaaagacgaaaaggcggggctcatcgggcggctcctttattcaccagcgccaccacccacggtcgacggcgctccagctgcaggatcaggttacgcaggcgcatcagggtcagggtgaccgacagcgtgaggaaggcaaagatgcagatccgcagcggcagacgcatacttgggtcgatggtttgctgcaggttggtcgagccctggtgcagggtgttccaccagtagaccgagtaatgaatgatgggcagattgaccaccccgaccagcacgaggatccccgccgcgcgcccggccagccgccggtcgtcaaaggcgtgccacagggcgatgaccccggcatacagaaacagtagcaccagctctgaggtcaggcgggcgtcccagatccaccaggtcccccacatcggcttgccccatgccgcgccgctgaccagcgccaccagggtgcagaccgcccccaccggcgccagggcggcgatcgccagatcggccattttgatctgccagaccaccccgacgaaggccgcgacggccatcgccaggtacagccccatcgaccacatcgccgccgggacgtgaaggtacatgatccggtagctttccccctgctgatagtccgcgggggcgaagccaaagccccaccccaggccgatgaccagcaacagcgcgctcaacgccgccagccaggggatccagcatccgcacaggcggtacagccgctcggggatcgccagttgatgtaacgctttccacatagacgcttactcacacggttatgatggccgcgcccgcaggcgcagcgagttatcgcacggtcagccgcagcgcagcggcggtggcgaacggacacagggtggcgctggcggttaagaacgccgccagcatcgccagatagccgctgaccgggagcccggcggcggccgcctggcaggccgcggtggcgaaaatcagcagcggcaccgccagcggcagcaccagcaggctcagcaggacgccgccgcgcttcaggccgaccgtcaggccaacccccaccgcgccgagaaaactgagcgtcggggtgccaagcagcaaggtcagcgccagcacaccggcgtcatgcagactcatccccagcagcagcgccgccagcggcgagacgatcagcagcggcaggccgctcatcatccagtgggcaaccaccttcaccagcaccaccgccaccagcggcgtcggcaggagcatcagttgctccagggaaccgtcctgccagtcgtcgcgaaacaaccgatccatcaccagcagcgccgccagcagcgcggcgacccacaccacgcccggcgcaatctgcgccagcagctgcggcgcggcgcctacgccgaacggaaacagggtgatgacgatcagaaagaaccagagcggattgaggatctccgccccgctgcgccacgccaggcgcagttcccgggccaacagcgcacgcatcattgcccgcctccagcgtcgccgccgaggcgcagggtgcgcaacggacagcccagcggccgcagcggctggtgggtggtgaggatggcgcatcccccctgccgggcgtgctgctccaggcgacgggtcagggtttccatcgccgtggcgtcgagggcggtgaacggctcatcgaggatccacagcggcgcgtcggttaaccacaggcgggtgagcgccacccgacgctgctgcccggcggagagctggctcaaggggagatcttcatagcccgccaggccgacggcggcgagggcgctttcccgctgctgaaggcgactggccggaaagaagaaacgcaggttttcatcggcggtcagcgccgcgttaacgccgggtttatggcccagccacagcagctgacggtgaaatgactcccggaccttcgccagcggctggccctgccagctcaccaccccgctttccgggcgcgccaggccgcagaggatccgcagcagcgaggttttccccgcgccgttatcaccggcgacctgcagcagctcgccggcagcgagggacagcgtcagcgccgcaaacagcggtcgatcgtcaacgatgcaggtcagtcgctctgcatgcagcatgaaggcaaactccttgattcagacagtattttacgtcgtcgctaagtatgggttgcgccgcgcgggcgacgcaaccctgacgcttactgtccggcccccggcagcttcgagatatcggcgttgcctaacgccttctcatcatgcgccgcagtctccttacgcaccttcgccacatcgctggcgctgaccgccggcgcgttgttgccccagctggtgcggatgaaattgaccacatccgccacctgctggtcgtccaggcgccagccgaacgacggcatggtcaggttggagaccgcatctttcaccgccggcgtggtgctcccggtcagaacgatgtggataagcgaagtggcatcttccgtctgtaccaccgggttgcccttcagcgacgggaaggcgcgtttatagcccgcgccgtcggtacggtggcaggcggcgcagttatcgacgtacagcgcggcgccggttttgctgtcgttacccttccacagatctttcgccacgctgtcttccaccggggctggggtctgtttgccgccgcgcggcgggagcgacttcaggtagcgggcgatggcggtgatgtcgtcatcagagagatactgcagactgtgctccaccacatcgctcatgccgccgaagaccaccgatttatcgttgcgtccggttttgaggaactcggccagctcggcttcgctccaggtccccagaccgtcgcggttttcgccgcgcaggctggaggcgacccagccgtcaatcggcgcattgctgcccgccaggtaatcatcgccttcgctttcgctgagcgctttttcctgcatcgtcaggctacgcggggtatgacaggcgccgcagtggcccaggccttccaccagatagcggccgcgctccagcaccgggtcaacctgcgggttggcgacaaagtcgctcggcgtcggggcgaagatgccgcgccagaacgccagcggccagcgcatcgacagcggccatgggatgtcggtgtccttgttggcgacattcaccggctccacgccgtgcataaagtaggcgtacatggcgcgcatgtccgcttcgctgatccgcgcgaacgagggatacggcatcgccggatagagcgtggaaccgtctttccgcacgcccttgcgcaccgcgtcgtcgaactcttcgaaggtgtacccgccgatgccgtgttctttatccggcgtgatattggtggagtagatggtgccgatcggcgtctccatcggcaaaccgccggcgaaaggtttccccgctttgccgttggtgtggcaggcgacacagtcccccgcccgcgccagatactccccctgcttaatcagattgctgtccgcaggcgcctcttcggcaaaagccgcgcagctcaatgccccaagcaccagggccgataaccattgcattttcatcatctgccttcctttatgcctgcaccaggggacccggatttttcagatactgctcacggatcgccttcgctgaccagtaggccagcgcggccaccgtgccggttgggttgtagcccagcccctgcgggaacgcggaggcgccgatgacgaagacgttatgcacgtcccagctttgcagataacggttaacggcgctggttttcggatcttcccccatcaccgccccaccgttcatatgggtggtctggtaggtggtggtatcaaagtggctgttggcgttttttgggctgccgaggatatatttcggcttcatcgctttggcgatcggcgccatcttatcgaacataaactgcgccatcttgatgtcgttttcctgccagtcgaaggtcatgcgcagcagcggctggccaaagacgtttttgtagttcggatcaagatcgaggtagttctgccgataggactggtgcgcgccgtgggcatccatcgacaggtgatgggtgtaggtgtcggccaccgccgctttccacttgctgccccacgccggggtgcccggcggtaccgggaaaccggagatgggcttggtcccggcctggttgacccagaatggcgaaccgccgacaaagcccgccgcgccgtggtcgaagttgtcggcgttgaagtcgtcgacgccgacgccgttgccgcccgcgccgataaacggattggtataggtgtctttgtcgaaaatggccttgatggtggtcatgttctggtaggcgaagttacgccccaccaccccttcgccggtctccggattgtacggtttgccgatcccggagagcagcatcaggtgcacgttgtggaactggaaggcgccgacaatcaccaggtccgccggctgttccatttcgcgcccctggccgtcgacgtaggtcacgccggtggcgcgggatttgtcgtcggtcaggttgaccttcagcacgttggcgttagtccgcagctcaaagcgtttttcctggcgcagcgccggcagaatgttcacgttcggcgaggctttagagtacatgtagcaggcgtagccgctgcagaaaccgcagaagttgcacgggcccatctgcgcgccgtaggggttggtataggagtcggaggtgttggccgacggcaggttataggggtgataccccacttccagcgccgctttttcaaacagctgcgccgaccaggtgtttttctgcgccggcagcgggaagtcgtccgagcggtccggggcgaaggcgttgccgccgcggcctttgccgacgaccttgcctttgatcgaccaggcggtcccggaggtaccgaatactttttccgctttatcgaagaacggttccagctcgtcgtaggtgacgccgaaatcctggatgatcatatcctgggggatgaagtttttgccgtagcgttcttcatagtggctgcgcatccgcagctcaatgggatcgacgcggaaatggacgccggaccagtgcagcccggcgccgcccacgccggtacccggcaggaaggccgccagctggcgatagggcaccgcctgttggctggtgttatgccggatggtgacggtgcttttcgacagatcctggaacagcttgcggcggatgttgtaggtcagctcatcaatcacctgcggataggcgccgtccggccaggtgtcgcgcatcgggccgcgctccagcgcgacgacgttgagccccgcttcggtcagctctttggccatgatcgccccaacccagccgaagccgacgatcgcgacatcggtttttttcaatacggtggccatgattacgccctctccccattaattgataccggcgggaaggggtagcgttcgccccgttcaacccagtccataaagtcggcgcgcgcgccgggaaaattaatcagcgtccagccgaccatgcctttattgccgccatggatcgggtcgctgaagaacccttcgcgggtgttttgcagcagataggtgaagaacagcgaggccggcagctgtttgaactcggctttacccgattcccacaggccgagcgcctcgtcctgctgctcgctgctcagttcagcgaaggttttatgatatttgtcctgacaccacgcctcggcgtcggcgatcccgaggttatagatctgtttgggcaccagcggcagctgataacccatctctttcggcacgtcgggattgaagggcccctgcatataccagatggagccggtggcgtaaggggtattgagctggcggtcgataaactccgggacgccggcctctttggcgccgggaccgagttcatccgccgggattaagcgagcgacggcggcgttgataaacgcccactcacgatcgttgaagaactgcggcttccagtcgctggccgccgcggtgttcccggaggctggctctgaagcgggggccgcctgcgcggtcgcgctggtggccacgccaatagcccctgctcccgcgccgccgatcaccaccgtcgggatcagcgccatcgatttcaccaggaaatcacgcctggaattgttggttttctcgctcgacatcatcacattcctgtcactgaaaattactgtttttgtcgctgacaaaaccagtgaatgtcgtgctggaaccgataccattgcgcttttaaaccgcttagcgtctggcccggcccggcaagtcggataaaacatcgccagaggcgatatcatttatagggttatcgtttggatagtagacgattctcaacgaaacgcgggaaatcggagagaaattcaccggtctgtcatcgtgagaagagtgctgccataaccttgaggcggtaaaccagcggcattcacaccgcgctgagcttacccatgcgccaaaaaagagtgacttgtatcacaaatgttattttttgtttatggtacatggcagattaaacgtctgtaaatactcgtattaggaataattaaacattttgagctgttaaaaaagttaataaccgttgttaactatcttgtatctattgtccggctagcgccttcagctggtgatataccatccacaggagaaaagaagatatgttcgatcatgtgaaattcggcgttagcgactatgccgccagcaaagcgttctttttgcaggccctggccccgcttggcgtaacgctggtcggcgaaggcgaaccgagctacggcgcagagctggccggcagcggtgatgcttctctatgcctctatcaaagtgcggaaaaaccggcgccgctgcacattgcctttcgcgccgacagccgcgagcaggtcgatgtcttctggcaggcggcgctggccgccggaggaaaggacaacggcgcgccggggctacggccaaactaccacgccagttactacgccgcgtttgtgattgcgccagacgggcacaatattgaagccgtgtgccatctggcggggtaacgggcggctaccgctgcggaaaaatccacacatcctccgccgggagcgtcagatggcagtgttcggcatcgcgcagcgccgttccgtaggcgcgcagcggaaagtcgtcgccttcggtacggaacaggtactcccagcggtcgccgaggtacatgctggtcagcagcggtagctggaggctgttagcctgcgctgcgccgtcgagtcgcaggcgctcgacgcggatcaccgccgtcgccggctcgccaacgctaaccccctcgcccgctcgcccccacaggctccagctggcgccttcgatccgcgccctgccgttctccagcgccatcactttgccgtgcaggcggttattgctgcccataaactcagcggcgaacagcgtcgccgggctgccgtacatctcctgcggcgtcccctgctgctcaatgacgccattgttcagcagcagaatacgatcggagatggccattgcttcattctgatcgtgggtgaccatcagcgccgacaggcccagcttaatgatcagctcgcgcagaaacacccgcgcctcttcgcgcagcttggcgtcaaggttggagagcggttcatccagcaggatcaccggcgggttgtaaaccagcgcccgaccgatggccacccgctgctgctggccaccggagagctggtgcggatggcggttgccaaggtgccccagccccagctgatccagcacacgctgcacccgctcttttatctccccggcggcgactttacgcagcttcaacggataggccacattgtcgaacaccgttttgtgcggccacagggcataggactggaacaccaggccgaggttacgctcttcggccgggatctcgctgcgcggcgtgccgtcgtacaccgtgcggttgccaatggcgatccgtccgctcgtcggtttttccagcccggccaccgcccgcagcagcgtggttttgccgcttcccgaaggccccagcagcgatactacctccccccggccgagcgtcatggacacccccttcaacaccgggttgtcgccataggtgagatgcagattttctaccgataactcaatcatgtaatttcactccaaagcgcagggcgataccaaggccaatcaccaccagcagaatattgataaaggagagcgccgcgacgatatcgatggcccccgccgcccacagcgacaccagcatcgagccgatggtttcggtacccggcgacagcagatagacgccagtggaatactcgcgctcaaagatcaggaacatcagcagccaggagccaatcagcccatagcgcgacagcggaacggtcacgtggcgggtgatctgcccccgcgaggcgccggtgctacgcgccgcctcctccagctccgggcccacctgcagcagcgtcgaggagatgagccgcaggccgtaggccatccacaccacggtgtaggccagccagacgctgaagatggtgttgcgcagggcgcgcagctgcacgataaggtgctcccgcagccagtcggccaccggcagcgccgagagccagccgtgcttcagcgactgatcgagccacatcggtacaaacaggaatacccacaggaaggccaggccggccagcagccccggtaccgcgcgcgggaccagcacgctgtagtcgagaaagcgggtgacgttgtccgctttgcggtgcatggcgatgccgacaaacagatagcagatcaccgccagcgcgccgccgatgatgccgatagccatcgagttgacgatcgcccgcagcaggttgggctgctgccagatattgtggaacgtcgccagcgacagctcatcccacagcgacacgccgacgccccagttggagataaaagcgcgcagcgccacgccgagcagcggtacgccgatggtcaccgtcagccaggccaccaccaccgccccggccacccagcgccatttgcccagcggcagcgcccgcgcctgggacgccttgcccttcatggtgacaaagcggttggcggtgcgcatcagccgccgctggagcatcaccagcgggatggtgatgcagatcagcaccaccgccaccgccgccatcagatggtaggagggggtgccgagcttgttagtcagcttgtagagataggtcgccagcaccatgttgccctcggggtcgcccagcaccagcatcagaccgaagacttccagaccgaggaaaaagagcaacacgcaggcgtaaagaatggatggccgcaccatcggcagactcaccgaggtcatcacctgcagcggcgtggcgccgacggtgcgcgccgcctcttccacgtcggagccgacgctgcgcagcgccgaagagatatagagataggcatgcggaacgtgagttaagccggcgatgaccacaatgctgaacatcgagtagatattccacggcacaaagccgatcagctgctgcgcccactgggaaaagaagcctaccggcccggcggccaccacgtagccaaagcccagcaccatcggcgagacgaagatcggcaccaggatcagcggctcaatgatccgccggccgggtaaatcggtgcgcaccatcagaaaggccaaaataccgcccagcggaatggcgataatcaccaggccaaaggccagaataaaacctgaccttaatgccagataaaaatccgggtcggtaaaaataaaggcgaaggcttccagactccacgatttggagcgggaaaagaacggtgccgaaagaaaactctgcaccacaataaataacagcgggacataaatcaccagcgccgtgatgcacaccaccacgccgcgcggcagcccctgccactttctgcgtaatacgttcatggttcatcccttcggtcaggtgtataaacccgccgggtgtgaataggggcatcggcgatgccccaggggaggattatttcgcggcggcgctgcgccattgtttaataaactgcagacgtttttgcggctgtaaataatcgagcagcgtttcgttgaccgggatcggttttaacgctttgcccagcagcgcggtcatgccgtcgatatcatttttacctgcaatatcgcgacgaatagagggaatatccgcctggctggcgaggatctgctggcctttttccgacaggacataatccagccacaatttcgccgcattgggatgttcgctctcctggctaataaacgagacgcgggagagcaccagcacgtaatctttcggataggcaatacctaaagagggatcgtttttcgcccgcgcttcggcataagagccaagaatgttatagccgatcaggttttcgccggaggagacgcgctccatcattgtgccggtggaagactgcaccgtcaggccgcctttggcgatattcgccaggtcggcaaaatagttcgcgtcggcctggctgtcctgtaccgccagcataaagccgaggcccgatttttcgatatcgtaggtggtgactttgcctttaaatttatcggcctggctggcgataagttttgccagcgcggtatgcgaatccggtacctcattctgcgggatcagccgtttgttatagataaacaccaccggctcataggtagtgccataggctttttgctgccagaccgcccagtcgggtaattgcttcacctccggcgaggcatattgttcggcgtattcggtggctaatttcagcgcggtatccatcgatgagctccacaccacatccccgctgccgcccccggcggcctgttcgctgatatagcggttatacagctcggtactgttcatgtcgttatattcgactttgacgcccgggtattgcgcttcaaatcccttaattaacggcccggccgctttggtatcggtcgtggaatagaccaccaccttgccctcttttacggcggcatcaatcgttttttgataatccgcgggatagcccgcaggcacctccgcccaggcggcacaggcgaaaacggccgtcagtgaaaccactaaaccacttattttcttatacatgataccaacctttaatcatcaattaataaacacaaatttaacatatagtggtatcagctccccttgcaacgacggggatggcttttttctggcttttgtgacactggcagaatttaaaaatgtggtgtttatggcgttaattaaaacgcgatcccggcccggttttttatcgtctgtcgtatgcgcaggcgctggcgcagcggcatgtcgccgggagacgccgcccttgaccttctgcgccgggcggcgcagcataaaacggcaaacataacaaaataacaacagactacaggagagaatcagtgcctacaggacaccgctttctggcgacggatctgcatcagtttgtcgtctcactgtttacccatctcggcagtaccccaggggaagccaccctcgtcgcggaccatctgatcgccgccaatcttgccgggcatgactcccacggcgtcgggatgatccccagctacgtcaaatcccacgccggtggttttctgcagctcaaccgccacgccacggtgaccaaagacgccggcgccgtggtcaccctcgacggcaacgccggcttcggccaggtggtcgcccacgaagcgatgcagttaggcattgaaaaggcgaagcagcatggtatggcggctatcgccctgcgcaatgcgcatcacgtcggtcgcatcggctactgggccgaacagtgcgccgccgccgggctgatctccattcacttcgtcagcgtcatcggcgacccgatggtcgccccgttccgcgggaaggacagccgcttcggcaccaacccgctgtgcgtggtgtttccccgcgcgggccatccgccgctgctgctggactacgccaccagcgccatcgcctttggtaaaacccgcgtcgcctggcataaaggcgaagccgtggcccccggctgcctgattgacgccgagggtcgacccactaccgacccggcggtgatgcagacctcgccgctgggcgccctgctcaccttcgcccagcacaaaggctatgccctggcgacgctgtgcgaagtgctcggcggcgcgctctccggcgggcaaaccacccatcaggagagcctgcagaccagcgtcgacgccatctttaactgcatgaccacggtgatcctgcgcccggacgcgttcgatgccccggacagccaggcgcagacggaggcctttatcgcatggtgtaagcagtcgccgcacgatgccgatgccccggtactggcgcccggcgaatgggaggccgccaaccgcgaagcgcggctggcgcaggggatcccgctggatgccggcagctggcaggctatctgcgccgccgcgcgcgacgtcggcctgagcgaatcgcacttcgaccgctgccgccctctcgcctagccgcgttttactcccgcagagcgtctgacgtcggcgctctgcgtcatcgtcattagtgacgaggtcatgctcccgtcatcaatctcttttcatttttcaatacagatcaagagtttaaattctggcacaagacctgcatagcgcaacaggcctgcgtctgcatcaccaccaggcgataccgcgatcgttgcccgtcgggcccggcgcgacagcgatcctcagttcactgttaacaggtctgttactgatgaaaaaaatcacgagcgtgtgcccctactgcggggcgggttgcaaacttaaactggttgtcgacaacaataaaatcattcgcgcggaagccgccgacggcgtcaccaaccagaaccagctgtgcctgaaaggctactacggctgggattttcttaacgatacgcagctcctgacgccccgtcttaaacaaccgatgatccgctaccagaaaggcggcgccttcacgccggtcagctggcaggaggcgattcgctataccgccagcaagctcagggagatcaaagagaagcatggcccgcgcgccatcatgaccaccggctcctcgcgcggcaccggcaacgaaaccaactatgtgatgcaaaagttcgcccgcgcggtactgaacaccaataacgtcgactgctgcgcccgcgtctgccacggcccctccgtcgccgggctacagcaggcgctgggcaacggggcgatgagcaactcgattagcgacatcgaaaactcgaagtgcctgctggtctttggctacaactgcgccgactcccatcccatcgtcgcccgccgggtaatcaaggcccgggacaacggcgccaaaatcatcgtctgcgatccgcggcgcattgaaaccgcgcgcattgccgatcgtcatctgcagctcaacaacggcagcaacatggcgctggtaaatgccttcggctatgtgctgctggaggaggagctgtacaacaaaacctatgtcgaacgctataccgaagggctggatgcttaccgcgaggcggtgaaggattacgccccggaagcggtggaagggattgtcggggtcagcgcgcgggaaatccgggaggcgatgcgcatgttcgccgccgccccatccgccaccattatgtggggcatgggggtcacccagtttggccaggcggtggacgtggtgcgcggcctggcaagcctggcgctgctcaccggcaacctgggacggcccaacgtcggcgtggggccggtccgcgggcaaaacaacgtacagggcgcctgcgatatgggcgtgctgccgaacctgttccccggctatcaggaggtcaccgaccccgccgtgcgggcgaaattcgccgccgcctggggcatcgacccggcgctgatggacgaccaggtcggcacccgcatcaccgaggtgccgcataaagcgctgaccggcgagatcaaagcctattatatcatgggcgaagatccgctgcagaccgaagccgacctcggcctggtgcgcaaaggcatcgaggcgctggacttcgtggtcgtgcaggacatcttcatgaccaaaacagcggaaatggccgatgtcctgctgccggccacctcctggggcgagcacggcggcgtcttcacctgcgccgaccgcgggttccagcggtttgaacaggcgatccctccggcggggaatgtgaagcgcgactgggagatcattagcctgctggccagcgaattgggctatccgatgcactatgagaacaaccagcagatctgggacgagatgcgcgagctctgcccgctgttctacggcgtgacctgggagaaaatgggcgatatgggccatgtccagtggccgtgcccgaccctcgatcatcccggcacgccatggctgtataaagacaaccgcttcgacaccccctcgggtaaagggcagctgttcgccaccgcctggcgcgcgccggcggagcgcccggatgacgagtggccgctggtgctgtgcaccgtgcgggaagtcgggcattattcctgccgctcgatgaccggcaactgcgccgcgctgcagtcgctggccgacgagccgggacgggtgcagatgaatcccgcggatgcgcaacgactggggatcgccgacaaacagctggtgtggatcagctcccggcgcgggaaggtgatctcccgcgccgacctcagcgatcgcatcaatccgggggcggtctatatgacctatcagtggtgggtgggcgcctgcaatgagctgacccaggataacctcgatccgatctccaaaacgccggaaaccaaatactgtgcggtgaaagtggaagcgattgccgaccagcaatgggcggagcgctatgcctggacggcctacagcgacatgaaagcgcgactgaaagccgctgccgacgtctgacctcagggagcgcagcgcgctccctctgccgctgccggtgggttacgccgccggcagctgtttctccaccagccccacccacatggcgaccccggggccgatcagcgcatcgttaaagtcatagctggcgttatgcagcggcttcgacggggtttcgccgtcggtgcctatccagaaataggcccccggacaggcctccagcatgcaggcaaaatcttcggaggccatcgacggcgcctgattccagcgcaccgcttgcgcgccgagagtggcggcagccacctcgcgcacctgctgcgcctgcagcgcatggtttttggtcaccggataacccgggaaccagctaatctcgccctgcacatcggacacctgcggctgggtcgccacatagctttcgataagctcccgcacgcgggcgcgaacgcgattgctcaggcagcggaaggtaccgcgcagcaccacggtgtccggcaggacgttgatcgcctcgccgccgtttatctgggtgatgctgaccaccgcggaatcctgcggcgacaagcggcgggaaggaatggtctgcagcgccattatcagctgcgccgccgcgacgatcggatcggccccgctctccggcatcgccgcatgacagctctttccgcgcagggttatctcgaaggcgtccagcgaggccatcatcgcgccatcgctgagcgccacttcgccaagagggatccccggccagttatgcagcgcgtagatggcgtccatcgggaagcgctcaaacaacccctcctccaccattttgcgcgcgccgccgaggttctcttccgccggctgaaagacaaagtggacggtgccgctgaaatggcgggtctgcgccagatgggcggcggccgccagcagcatcgcggtatggccatcgtggccgcaggcgtgcatcaccccgggacggcgtgaacggtagctgacgctccccagctcggtgatcggcagggcgtccatatcggcgcgcaggccgataaccggcccggggccgttctccagcgtcgccacgacgccggtgccggccagcccgcgatgcacctgcagcccaaacgaggccagcagctccgcaacgcggcgcgaggtctcctgctcctgatatccgagctcaggcgcggcgtgaaattcacgtcgccagccaacggcttcggcgatcagtgacggcgatacggccatgtattactcctttcctgcatagcgtaatgctgaataatcggtcatgcgtcgcgtttttccccgtcgctcaccggcgtcggggcgctgccgctccctccgttatatcctgtcgttaccacgctgacaacgtcacgaaatgcggcggcggcgcggcgtacagcccacctgccgccctgcggcccttttttggtagtgatttcaacggtgacaacggccagtcgattaattattatgcaactcaggacggcaatttgccgaaggatccactactgacctctccgtcatcggaaataaaatgtttaacccagaccagactcgtcttgcccccacgctggcgatgatcatggccgcgtcgctcgtgggatttatcaccggctatacggtgccgttaatcagtcttgagctggcgcagcagcagatcgcgccgctgtacgtcggcctgctggccgccctgccgcccgccggcatgatgatctcctctttcctctctcctgcgctgtgccggcgcgttgaaatgggcgtgctgctgagcggcagtctgatcctgctggcgctggcgaccatcgcctcatgcatgactaccgatatgacgctgcttttgctgccgcgcctgctgaccggcctggcctccggggtcattatcgtactcggcgaaagctggatcactggcggcgcggcgggcagccagcgcgctaccctcaccggtctctacgcctcggcctttaccggctgccagctggccgggccgctgctaatctccgtcggccccgcctggcagacctcagcgctgatagcgattgtcgcggtcaccgccgtctgcctgctgatgctgcgccatctgcccaccggcactcgtgaaagcctcggggagcgcgccagctggcgcagcctcggcgcctttctgccggtactggcctccggggtcttctgcttcgccttctttgacgccagcatcctcgccctgctgccgctgtacggcatggacaaagggctgaatgaagggctggcggtgctgctggtcaccgtggtgctgaccggagatgcgatgttccagaccccgctcggctggctggccgaccgggtcgggattcgccgcgtgcatctgagctgcgcggtggttttcagcctgtcgctgctggccctgccgctgatgctcggttcgcgcattcagctgatggccatttgtctgctgctgggcgccgcggcgggcgcgctttataccctgtcgctggtgcgggcggggaaaaccttcaatgggcagaagctgattatgattaacgccctgttcggctttttctggtccgccggcagcgttgccgggccggtagtcagcggcatgctgatcggcatcactggttacgatggcctgatcgtcaccctggtggccagcggcgtgctgttcctgttgattcagtgtctgtgcaaaaacgagaaaaccctgcttgccagtgagcaggaagatgacatggacgaggcgacggagtccgcacggtagtcctcacgggctggcctggcgccagcccttttttatggccctcaccggagggtatcctgttcttgctggctcactgctgttaaccattgccggcccccagccgagaggaaatcccatggaaagtaataccttacatcgtggcagattgatcgatcatattctgctggttgtcgaagactttgaggcaagcaaaaacttctataccgccgtactgtcggcgctggagatcccggttatcaccaccgccaatgaatacttgctggccgacgaactggtgctggcctcacgccacagcccggaggctgccgggaaactgactgggcgccaccacctggcattccaggccagagatcgtgacatggtggacgctttttaccatgcggcgctgacccatggcggacgtgataacggcgcgcctggcgaacgacactatcatcctggttactatgccgcttttgtgctggatccgcaggggaataatattgaggcggtgtaccatggcaaggctgagcgcagcgccgggtctgttgcgatcagcttcacgcagtaagcgggcgaaagtcacattttcttacctgcgcaattcccataataaatgtgggtgttatcatttccttgatgaataattcatacccatagctgaggcgtcgatgctggaaaacctaatcatctgataatcagacttccgaccatcactggccggactgattatcactgcgctgaaatcgaatgcggacactggcgagtgttcgcctattttgcccatgatgatgacaaaggtttcccggtatgaatgtttcccctcaggagcaagcgactttattcattctcgtcccctgcggacaaacgctccacatccacgcgatggcagcgagacccctccctcgcataagaaacgtcacccccagccagttaacccggtgcgttatccctctgccatgctcgatcactccctctgcatgccgttgcgttgccttacccaatgaccgtcgtcaggcgaattttatctttcgatttgtcattccgcggccagcctgtgacgacagtcgcaagggatccacatcaaccaggccccgataccagggaaaccgtcaccgaccagggagtcttcgcgtatgaaattagcgttgggaccgtacatccgttttagcagaatcttgttatttccgctggcgatggttatctatgatttttctgcttatctgactaccgatctcattcagccgggtattatccacatcatccgggaatttgaggctgatgttgcgttagccccggcctccgtcagcctctatttagccggggggctggccttacagtggctgctggggccgctctccgaccgcattggtcgccgccccgtactactgaccggagccatcatctttgctttggcctgcttcagcatgatctttgtcacgtcgattgatcaatatcttatcgcccgttttatccagggaaccagtatctgcttcatttcgacagtcggttatgtctccatccaggaggcttttgatgaaaaagagtctatccgcattatggcggcgctgacatccatcgttttgctggcgccggtaatcgggcccctggcgggcgctggcctgatgaatttcctgcactggaagttattgtttgcgatcatcggcgccatgagcttgctggcctgggcgttattgatttttaacatgccagaaacggtcacctctcagggccgggggtttcgtccgggagaggtattttccgagtttgtccgcgcctttaaacagccggtggtgctcacgggcgcgctggcgttgtcattcagtaacctgccgataatcacctgggtagcactctctccggtgatcctgatcgatgacggcgggatgtcgcgcggcgcctatgcctggacccaggtgcctgtctttggcggcgttattattgccagcatcatcgtggcccgttttatcaaggatccgacctctccccgctttatctggcgcactatcccgatacagctgaccgggttgttggtattactggcgggaaatattgcatggccccatacctggtggtggtccgtttcaggaacgagtctctatgccctcggaacaggcctgttgttccccgtattattccgttttgcgcttttttcccactccctgccgaaagggacggtttcagccaccatcaacattgtggcgctcagttttatggcggcctcggtggaagtagcgcgctgggtttacttccaggctggcggcagaattgcttttcactgcctggcgctgatagcaggaatcgtcgtcatcatgctggtctcgcgcttgttaaaactccgtcagcaacatcttcttcagccagcctgaaggtttaggcctttttgcccgcaacaggagaacactatgttttcatacattatgctgggaacgaacgatctgccacgcgccatcaagttctatgacccgttaatggcgctgctgggacacgtcaaagccggccgtaacgaacagggggcgtcctggggcaccttcaacggcaatcacacctgcgggctgtgcgtgggtgttccttttgaccagcagcctgccggggtgggtaatggaacgatggtggcgcttaacgcccgctccgtcgcacatattgcggaactgcatgccctcgccctgcaactcggcggacgtgacgaaggcggtcccggtcaccggccgcagtatggcgacggttttcacagcgcctacgtccgcgatcccgacggcaataagctggcgtttgtttactatgcgtcggcagattgaatggctgcagcggaggtggcttatgcagacggagataagggagtcaggacggccaacttcgccgtccttattcaccgaggaataaaaagccagcagctcaagcgctgcggcttatcttcccggcaagttatctaccgcaaagtgataacgtaatccggcgtcgcgcatacagcgtttccgccgccagctgaaaatcatattccatcgccttcagctttttcgtcttgagctgttttagtggaataccctcgatatgccctgtcgcgaccaaccaccggatttcagccgtactcagcttgagctgttttttcagtattgatagcaggctgatgcgaaatggctgactgactctgacgcgcaccgttatccgctgacatgccatcaacgtaaccgaccattgctcgtgaatacgaaaatcaggttgccccgacggctcggcgcggttgcgcttcagcgtcgcgaggtcagcggcataatagtgaaccatagctgcatcgttctgcagcaggcgctgaagcagttcacgatttatcttgctgacgtgcagcctggaaaacagggcgatattccaggtgtaatcgcagcgcgtgcatttatagatgctccagatatccagcagcttcttttgcgaattcacccggatggcgccggaaggcgcaaagtcgcgttttacattgcaggcggggcagcgtttggcaatgtgctgataccccacgggcgtgaccgtccatgtaactgtcataacgtaccttttttaacccatacgaaaccgagtccgtgattaacggaccatgatttttggcgtatgaaaaatagttaatcgctatttttcagtgggttaaaaaaagatttccaacgttattttcctggagaagtcctaatcgacaccctgagattaacaaaggggttatcgcgggatatatgagcccagtcaatgtttgcgcggatgattaaaagcttcgtcaatacacccggaatgctcagcgggctggcatcgcgccagcccgcccggtttacagcaccttgctgaggaacgcggcggtgcgtgggttggtcggcgcgctaaagatctgccccggcttgccctcttcctgaatcacgccctggtcgatgaagatcacccggtcggccacttcgcgggcaaagcccatctcgtgggttacgatcaccatggtcatcccctcgctggcgaggtttttcatcacctccagcacgtcgcccaccagctccggatccagcgccgacgtgggctcatcgaacagcataatcgacggcttcatcgccagcgcgcgggcgatggcaacccgctgctgctggccgccggacaggctcgagggccaggcgtcgcgcttatcgcttaagcctaccttcgccagcaaggcctccgccaggtcgaccgcctgctggcgcggcatattgcgcagattcatcggcgccatgatcaggttttccagcaccgtcatgtgcgggaacaggttaaagcgctggaacaccatgccgacgctttcgcgcatcttgttgaggtcggtggtccggtcgtgggcggcaaagccgttaaccaccacctcgccttcgctgaccgtctccagggcgttcatgcagcgcaggaaggtgcttttccccgagccagacgggccgatgatgcacaccacttcctgcggtttaatatcgcagctgatgccgcgcagcacgtggctgtcgccgaagcgcttatgtaagttattaatgtgaatcacttttgccaaacctcttttccagacggttaaccagctgcgccagcaggaaggtgatcacccagtagaccagagagatggtcaggtagggttcccagtaggtggcgtaggcgccggagacggtgcgcgcggcataggccagatcggccaggccaatcgccgaggccagcgacgagtctttgacaatggcgatggcgttattgcccagcggcggcagaatacggcgaaacgcctgcggcaggatcaccttgcgcatggttttccaccacggcatgcccagcgcgcgggaggcctccatctgccctttgtcgatcgactggatgccggcgcggaaaatctccgacacataggccccggcgttaagggtgatcgccacgatgcaggagaggaacgccccgtagctggcgcgcagctcgcgggcaaagtcggcgctcatcaggccgctggtcaccagcaggccgtcgcgcgggttgataaacagcggcaccagcgcaaagtgcaccaccataatctgcacgaacagcggcgtgccgcggaaggcgctgacgtaaaagcgcaccggaaactgcaccaggtagcggagaatatatttccacggcccgtgctcggccttcgccatccgcccgagaccgagagttaacccccagagcgtcccgaggatcacgcagataatggtacatttaatcgtcatcagggcgccgtccacaaacagcgggccgtactcctcgatgatctcccaacggaatcccgtcatagtccttccctaaaaaatacggctatcgcctgggcgatagccgtggtcactgaaaaaggtggattattgcgctggcagcgtcggcacgttgtcgtcgaaccaggttttatagattttggcgtaagtcccgtcagcaacgatcttttgcagcccggcgttgattttgcccagcagttcgctgttgcctttcgccaccgcaataccgaaatactgacgctcaaatttggcatccggcaccagcttgaactgcttctccgggtgctgtttgatgtagtacttcaccaccccgacgtcgccaaccgcggcgctgacgccgtcctcaaacagctcctggagcatcagcggggtattgtcgaagcgcttgatcgcggtgctgtttttacccagcacctcagaaaccacgatatcgccggtgctggagttcaccaccccgaccttctcgtttttcagggccgccagcgaatccacctgcgagtcctgagcgacgacgatagactgttcggccgggaagtacggcgcggagaaatcgaccatctgtttgcgtttatcggtgatagtgatcccggagatgatgatgtcgcggtcgccggtgttcagcgtggcgaagatgccttcccatggggtattgaccagcttaacgtcaaagccttcggctttggcgatggctttgatgatgtcgatgtcgaaaccttccagctgtttctggctgttttcaaattcaaacggccggtaggtgccgccggagccgacggtataggtttccgcagccgcctgtccgacagccgtcagcgcggctatcatgcaacacgctttgagcaaattcttgaccatgagatttcctttttatgcatttattttgcataaaaatacacacactcacttttatatgcaaccggaaaccttcccgctggtgaattatcttctcaatggccccgtttaccgccggatttaccgatagcccgatgcagatcgttgattcgtttcagggatttcaccgttttttgtggcgtggtagaggccaccgacaggacaatcatctcgagacagaccagcaccgtaccgtgcagcggcatccggctactgtccccgccgcgcgggacgtcgatcaccacctgcgcctcctggctgaagcgcgagtccaccgcctgggtcagcaggatggtcggaatacccagccgcttcgcctcgcgcagggtggtcaacccttcgcgatggggggatttttgccccatcatgatcagcacatcgccgcgctgcaggccgataagctgttcggcaaggctaaagcccgtgcggttcatcacgtacgccggcaggccaatacggctgaacaaccgggcggtgtattcggcgaggatccccgaggcgccgataccgaagatccccacctggcgcgcgtcgctgagcaatgccaccgcctgagccaccgccgcgcggttgtcggcccgcgacagaacctcgcacacccgctgatggccttcaagcacaaaatcaatactggagttgacgtcgctggagagcgcggtaaccgtcgagcgcatcttttccgccgaggtgaccgaggtgccgaaccagcgctccatggtctgcttaagctcgcgcagcccggcgaagcccagcgcctggatggcacgcaccaccgtggcgtcggaggtctgggtcgcggtggcgatctccatcgcggtatgctccagcaccacctcgcggttgtcgttgatatagctgaccaccgcccgcagccggggggagagctggtgcgcccgggcgcgatagcgttcgccgaacagatcgactttgcccttctctttttttaccgcgcttttcatttggcctccgccgggatcggcctgccggcaatatgcgactgcacctgggccaccatcagggacagcgcggcgtaggagttagagatcacctcttcccgcggcagtaaaatatagtgcccggtgcggcaggcgcgcataaagtcgcaccagccgggcatcacgccttccatcgcctgcagctcatcctgcggcttaccgccggtatccgaccgccaggtggcgaagacaaaatcagcgtccagctccggcagctgttccgcgctgacgtcaatgcgctggccgtcggggatccgctcaatcagcggcggaaagcggaacccggcgtcgcgcagcacccggcccagcgcatgatacgaatgatgcaccgtgaccttgccgttgttcgcctggatcactgagacgctgtactgcggtgggttgaccatcgctttcagctgtttaatttgttcctgatagcggcgctcgaggatcgccagccgcggctgggtgccggtcagctgcgccagcttgcggtaaatctccggggcgctgccctgcagatgatcgatgctcaccgtcggggcaatcttctccagttgctccactgacacgtggcggctgggctcggtgataatcagatccggctttgcggcggctaccgcttccagatcgatatcggcggtgccaataaagcggatatcgctgttgtcgaaatcgacaccggtgagctgggcgctggcgcgcagatagtggctgccgtccgggcgcgtccggccgtggctggcgatcggcggcgccccgagctcaatcagcggaatggtaatatcgagatcgtgcatcgaaacaatgcgctgcggatgcagcgggacggtgacggtgcggcctaaatcatcggtgaaagtttgagtctgtggggcggcggcgctgacgacccccgtcagcaacagcagcaatgagacgaaccaacgcatactaccttcctggttaaagggcatcacggcgacgccagagcaagacaacgaagaacgggcagcccaccagggcaatgacaatccccgccgggatctgcagcggggcaaacgccagccggccaagggtatcggtcgccagcaccagcaaggcgccaatcagcgcgctgccgcacagcagcgatacctggccgccgcgcagcacgaaacgcgccatatgcggcgccatcaggcccacaaaacccaggctgccgacgcaggagacgctggccgaggtcagcagcaccggggcgaaaaagcgcagcaccgtcagctgctgcagacgtacgccgaggccgatggcggtccggtcgcccagcagcgccacgtccgccgcccgggcggtacagaacaggatgatggccccgggcagcgcccagcaaaaagccaccgccagcagcggccaggtggcggcctgcaggctgcccgccagccagatcatcgccgtctgcacgtcgcgtacgtcggcggtggtcataaagatgccgaccgcggccgccaggctccaggagacgccgatgccaattaaaataaagcgcggccgcgaacagtcgcgggccagcgtcaggaccagcagggccaccgctatgccgccgaccatccccgccagcggccgccagaccaggcctaccgccgggaaaaacagcaccagcgccagaaccacgatgcttaccccctctttgacgccgatcagccccgggtcggccagcccgttacgggtgatgctctgcatcgccgcgccggccagccccagcatggccccgcacagcagcgccatcaggatccgcggcaggcggatatcaaacagaataaagcgcggctgctcgcccatctcctgcggcgccagcagagcccgcgccagcgtcgacgcgggcagcggatagctgccgcggctaaggctgtacagccccagcgccagcagcgtcagcactatgctggcggcaatttttaacgccgcaggacgcagcagcagatgacgggaggcgaaagccagcggccgaaaaccggcccggtgaacggcgcgcgtcatttaaaaaacctcgcggcgataaagataaacaacggcgcacccaccagggcggtcatcgccccggtcgccagctcctgcggcgcgaccagcgtccgggcggcgatatccgccagcaccagcgccagcgctcccaccggcgcagccaggggcagcgccaggcggatatcttccgtcaccagacggcgcaccacgtgcggcaccaccagcccgacaaagccgatcggcccggccaccgccaccgccgcgccgcagagcagcgcaatcgccagcagacccagcagccgcgtctggacgagattaacgccaaggcccagcgccaccttatcccccagcgccagcacattaagccgtggggcaatgagcagcgcgacgccaaggccgatcagcgccggaaccagcgccgtctgcagcgtgctccagttcagtccggccaggtcgccggccagccaggtacgcatcgccagcagcgtctgttcatcgagaatcaatatcgccgccgtcaccgccgacgcaagccctgacagcgccactccgcacaacgtgatgcgcagcggcgtcgccccgccgcgcccggcagaggccagcgccatcacgccaccgaacagcagccccgctccgcaggcggcggtcagcgggcgcccggcggggaaagcgccgagagacaggcccagcgccgaggtcgccaccaccgccagcgaggcgccggcgttaagcccgagaatatgcggctcgccaagcgggttacggatcaccgtctgcagcagcagcccggcgacgccgagcgccgcgccggtcagcagcgccgccgccagccgcaccagacgcagatcgatgataatccgctgctcaaagttgcgcggatcgtactccagcagcgcctgcagtaccgtctgcggggcgatccagcgggcgcctaagccaagatgcaccaacgaggcggcgataagcagcagcgttagcagaagcagcgccagccgggggcgggggcgacgccgcgcggaaagcaggatggccacgctcattgtgccgctgcctggcgggcgcgaaacggcataaagaagggtttgccggtttgcgggttaatcgacatctgcacgtcaacgtcaaacacgcgtttaatcagctcagggctacagacatcgttgtcgctaatcgtgccggcgatgcgcccctgtttaaggaataccagcagatcggcgtagttcaccgcaaagttaaggtcatggagcaccgtcaccaccgtgcggccatgttcgcgggtgagggtctggagcagctcgaggatatcgacctgatagcgcagatcgagccaggtggtcggctcatcgagcagaatggtggccgtttgctgggccagcgccatggcgatccagcagcgctgacgctggccgccggagaggctgtccaccggcagatgggcgaattcggcggtaccggttaagcgcagcgcctcctctaccgccagctcatcggcctcggaccactggcgcatcagcccctgccacgggtagcgcccgcgcgagaccagctcgaaaacggtcaatccttccggggtcaacggcgattgcgggaggatgcccagctggcgcgagacggctttcgtcggcatctggtgaatggcttgcccgtccagacgcacacagccgccgagcggtttcagcattctggcgatggtcgagagcagcgtggatttgccggatccgttcgccccggccagcaccgtcattttgccggtgggaatggtcaggttgatatcgtcaacgatcagggtctggccgtagccggccgacagggcatccagtacgatcccctgctctgcaggtttcacccgctgtggcataactcgctcctgcgccgcagcgttccaggcgatagctggacattctgcagtcaaatcaaaataaatctcattctcttttgatcatgacggggatgaatgtagtagtcaatactcgccatcgtcttcagacggggacgctgactacagcgagactgtgccaacgcaatataattaaaataaaataatatcagatagataacgacagaacattccctactggaggtgtttaaaacgtcctgttcctcgccgctgaatttttatcttgcataacgtttactactacatcccttcatgattgaatgattctcaattacacatctgaaggcgcattcagacgctaaacagagtgcttttattattcagggcaatgattttattggcttagtctgaccgcaaaggcagattcgttcacgagaaacagataatgactcaaccccatgtcgcctgcaggacgttgccagggcgcgcgcttttttcgcttctttttttagcctcaccgggattaatggccgccgacaatcgcgcggcgaaaagtactaacgacgcggaagagactatcaccgtagtggccgacggcgcgcagcaaagcgccaccagcggctatcagccgctcagctccgccaccgcgacgctaacctcgatgccgctgctggatattccccaggtggtcaataccgtgagcgatcgggttctcgaagatcagcacgccacctcactcgatgaggcgctgtataacgtcgctaacgtggtgcagaccaacaccctcggcggtacccaggacgcctttacccgccgcggcttcggcgccaaccgcgacggctcgatcatgaccaacggcctgcgcaccgtgctgccgcgcagctttaacgccgccaccgaacgggtggaagtcctgaaggggcccgcctcgacgctgtacggtatcctcgaccccggcgggctgatcaacgtcatcactaaacggccggagcggcagttctccggttcggtttccgggacctccaccagctttggcggcggcaccggcagcgtcgacatcaccggccccatcgaaggcacaaatctggcgtaccgactgatcggcgaatatcagaatgaggattactggcgcaatttcggtaaaaacaaaagcagctttatcgccccttccctgacctggtttggcgagcgggcaacggtgaccgcgtcctattcgcaccgcgactacagcgccccctttgatcgcggcactatcttcgatctgaataccggccatgcggttaacgtcgatcgcaaaacccgcttcgatgaagcgtttaatattaccgatggctattccgatctcgctcagctcaacgccgagtatcgccttaacgacgcctggaccgcgcgcttcgactacagctacagccaggatcattacaacgataaccaggcgcgggtgatggcctatgattcggcgaccggcaacctcacccgccgggtcgatggtacccacggttcaacgcagaagatgcactccacccgcgccgacctgcagggcaacgtggtagtgggcggcttttataacgagctgctgaccggcgtcgcctatgagaattacgatctgctgcgcaccgatatgctgcgctgtaagaacgttaaaggctttaacatctatcatccggtctacggcactctcgacacctgtaataccgtctccgcctccgacagcgaccagcggatccagcaggagagctatgccgcatacgtgcaggacgcgctgtacctgaccgacaactggatcgccgtcgccggcgtgcgctaccagtactacacccagtacgccggtaaaggccgaccgtttaatgtcaataccgacagccgcgatgagaaatggacgccgaaagccggcctggtctacaagatcacgccgaacgtctccctgttcgccaacgtcgcccagtcgtttatgccgcagtcgtcgatcgccagctatatcggcgagctgccgccggaagagtccacctcttacgaagtgggcgccaaattcgacctgttaaacggcattaccgccaatatcgcgttgtttgatattcataagcgtaacgtgctgtacaccgagagcattggcgatgagacggtggccaaaacggcgggcaaagtgcgttcccagggcgtggaagtggatctggccgggtccatcaccgataacctcagcgtgatcgccagctacggctacaccgacgccaaagtgctggaagatccggattacgccgggaaaccgctgccaaacgtaccgaaacataccggttcgctgttcctgacctatgacattcataacgtctataacagcaataccctgaccgtcggcggcggcggccatgcggtcagcaagcgctccggcaccaacggcgcggattattatctgcagggctatgcggtggcggatgtgtttgccgcctataagatgaagctgcagtatccggtgacgctgcaggtgaatgtgaagaacctgtttgataagacctattacacttcctcgatcggcaccaataacctcggcaaccagattggcgacccgcgcgaagtgcagttcacggtgaagatggatttttaagccggaccatggcgtcgcgccggatattcattgccgggcggcgctgcgcttgcgccggcctacctttccgtgacatttgtcgcagcgccaccggggaatgcgttcagcttaccagtccgcctcctggccgaggatgcgcaatatatcctgacgatgctgcagcagctgcgggttatcgcgatgacggggaaaagccagcggcagcgcaaactcggcgataatccgccctggacgcggcgacatcaccagcacccgctcgcacagcagcagcgcctcttcgatatcgtgggtcaccagcaggctggtatacccctgctgctgccagagggcgatcagctcccgctgcatactgatgcgggtcagcgaatcgagtttgcccaacggctcgtcgagcagcagcagacgcggttcgttcaacaaggcgcgcgccagcgccgcacgctgcgccatccccccggacagctgccgcggccacgcctcgctgaaggcctgcagcccgatgcggtcaatcagcgcgtctgccttcgcctccagcccctttttgccctgcgcctgcgggcccagcagcacgttctgccgcaccgtcagccacggatagagcgtcggatcctgaaacaccagaattcgctccggccccggggcgccgagcgccgcgccgtcgatctgcatctgtccgctctgcggcgcttccagccccgccagcagccgcagcagggttgatttaccgcagccggaagggcccagcagcgccacgctttcccccgggcgcagctgcaggctgatattctccagcaccggtaccgtctgtttgccaagcgtaaacgcatgatgaagatggctgatggataccgccgcgccgcgcgctatcgtctcggttaccattgcatccctcctcgctgccagctcagcagccggtcacgcagcataaataatccgcttatcaggccggagcataacaaggccatcaccagcagcgcggcatacatattaggataggccgcccagccctgggcccactggaggtaaaagccgatccccgacttcaccccgaccatttcggcgacaatcagcaccgaaaacgacgcgccgagccccataaacaggccgacaaagacgttcggcaacgcggcggggatcgccacccgcaggatcaggaaacgctggctggcgccgagggtccgcgccacgtcgtaccacgccttatcaatgcccatcactccggaccaggtcagcaccgtgaccgggaaccaggtgctcagcgcgatcaaaaacacgctggcgccgaagctcgagggaaaaataaacaggcacagcggcagcagcgcggtggacggcaccggccccagcagacgtaacaccggatgcacccagtagccaatccgttgcgaccagccgatggccagaccggtgatgaacccgctgctggtacccagcagcacaccgagccccagcagccccagggagtgcagcaggctgtcgagcaggcgcggccagtcgtcgtgcagcacctcgatcagcgcctgcggcggcgcgaagaatggtaccggcaacacggcagttttggcggtcagcccttcccagacagcaaacagcaccggcagcagcgccagccacttgccggcatgcagcacacgcgcgccgcgcgcccgccagtagcgatagctcagcgccagcagcagcaagccgccgccgagggtgaattgcgccagcgcccagccttcgctaaacggccagcgccgcccggcgtcgggccaggccagggtaaacagaccgcccagcagccacagcgcggcggccagcagcccttctccccacagcggcgcgcggccggtggggcgcgccagagcctgctcaggcgaatacgttggcatagatactctccgcgaactgatggggatcggtacccggtttgatcacctgcacccgctgcaggtcgaccgcatactgcgtcagctctttcacgaacgcttcgcccaccgcgtgatggccgtggccctgcccgtgcaggatgccgctcacctccgcttcactggtattcagggcatgggcgaggaaggattgcgccacactttccggatgcgcagcggcatagctgtgcgcctcaaggatcgcctgggtgagcgccgcggcggccggtttatggtcccgcgccaggctcccgctcacccccagcacgcagcagctgaggttggcataatccccggtcatattgctggcgatcagctgatacttgccggtctccagcagacgatagctgaacggctcgctgccgctgatggcggcgatttcgcgcttgtccagcgccacgctgagcagatccgccgggtagactttccactgcacgtcgctgatcgggtcgataccgtggcgcttaagcagaatggcgaagaagtttttatccggtccggccatgtcggtgacgccgatggtttgacccttcaggctctcgaggccgccgaacggcgagtctttagccgtcagcaggttcagacagccgccgtgggtcccggcggtgagcttgacgtcaaagccctgctccagcgccttcagccagcgcagcgccatccccaccccggcgtcggccttaccggtggcgatcgcctccagcagcacatcggtggagttgccgaagttaacaaactcaacgtcgaggttgtatttactgaatatcttctgctgctcggcgacggcgaccggcgcgaggcataccgcgcttttgttgatcgccagcttgatcttgtagggctctggcaggcgcagcgccggatgggcatcgccgccggccatgtccgccatatcatgagcccacagcggcagagagaccccggccagcgccaggccgccgctgagctgtaaaaaacggcggcgggaaaaaggggttctggtcatggcgtcacctcggcggcgggcacgctaaaacggcggtcaaaggtcggcttcacgtccagccgggtgcggatcaggccgttggcgagataaaagtccgccgttgcctgctgctgggccactgtttcctcggccagcggctgccactgcgactggcggttggcaaactgcgcgcgggcgatctccgccgggaagcggatgatctcccccaacgttttgccgtagctgtcgagattggcgtaggcccagcgctcggcgccggccaggcgctggagataatcctgcagcgcggcgcgtttttgcggatcgttaagcgcggaatccgttgccgcgaggaaggtattccccggcagcagccctttgccgctcaccaggatctgcccctcgttggtcttcaccatttgggtggtgtagggctcccaggtcgcccaggcgtccaccgaaccgtttagcaacgccactttggcgtccaccgggccgaggaacacccactgcacctccttcggtgaaatccccgcctgctccagcgctttcagcgccacgaaatgaccaatcgaccctttaccggtggcgatgcgtttgccttttaaatcagcgccgctttttaacgtgctgccgggggataccagcaccgcggtccccgccgggttgcttttatccacggcaatagctttgaccggcgcaccgttggccagggcgaagagcaacggcgcatcgccgatgatccccgcgtccacggcgcccgcgttgagggcttccgccagcggcgcggcggccgggaactcggcccacttaatgtcgtaagggagattttgcagggcgttggccgcctccagctgcgaacgcatgccgcctttttgatcggcgatacgcagggtaagccgctcctgcgctgtcgcgtagccgcccagcgccagcagcatcagcgcggccgccacccggcctgaaaatgatagacgcatcgtgattatccttgtgattgaaagacgaagttgccggctgccagccaggcgctatcgctctgtggggtatgtacccgtccgcagagcacattgcggtagtggcgttccagcgggttttgtcggctgagaccatgattgccggtcagctcgagcgcgatattcaccgcctgaatggcgttgtcggtgatggtgactttcgccagattggcctcgatggcggaaaagcgcagcgcggcggcctgctccagcaggctgcggttgaccagcagcagcccggcgatctgcccgactttctcctgcacccgtggcagacgagagagcggatggccgagaccggcgggcacccgccccgccagccacctcaccagccagtcgtgagcggcgtgggcaatgctgtcatagatcgccgccagcagcgccgtctgccggttggcgaacaggcgaaacggttcggcctgggcggcgggtggcgcatcggtcggccagacatccaccgcgtgctctgccgccacccgaacgtggttaaaaataacttcatggctgccggtggcccgcatcccggcgtgatcccagcttttcaccacgctgatgcccgggctgtcgccaggcaccagccaggtacccaccagcggcgggttatcatcgcttctggcccacaccgccaaccagcgcagcccttcaatgccggtggtataaattttatggccgctgatgtcccagccctccgcgcgacgggtcgccacggtgtccggcaggccgccccgcgccggggagcccaactccggctcgacgcgcaggctgttgatgaggccaccgtgttcgacagcatcgtgaaaaacctgctggcgcagcggcgcgtgccaggcgtcattttccgccagccgcaaatggtggagatactgcatgcagacgatcagcgctgtcgccggctctccccaggcgatggcggcgatgacctgctgcagctgggccagactggcgcccgcgccgccgcaggatggcggcacggcgagacttaaccagccccccgcacgcagatagtcgatattacgccagggaaactcgccgctggcgtcaaggctggccgcctgctccgccatctgctggcggagcgccgtcagctgccgggcccagtcgtcgcactcaggatggatcacgatgcgcgctccgccaccgcacgccgggcggctttttcccgggcgatcggcagcagcgcccggccatagtcggccgcgtcgttcagcggatcgaagccgcggatcaggaagttacgcaccccgaggtcgtagtagtcgagcagcgcatccgccacctgctccggggtgcccaccagcgcggtggaattatgtccgccgcccaccagctgggcgatgccggtccacagacgtttgtctaccactctgccctgcgccgcggtggcccgcagccgctgggcgccgatgctgtccggtttggctttgaacccgcctccgcgctgcgccgcctgctcggtggcgacgtgcaggatatgctcggctttctcccaggcttcggcttcgctgtcggcgataatcggccggaacgagacgctgaagccgatatcacgctggtgtttcgccgcttcggcgcgcacccgctggatggtctcgccggtttgcgccagcgactcgccccacagcgcgaagacgtcggcatgtttgccggcgacggcgatggccgcttccgacgagccgccgaagtagatgggaagatgcggcttttgcagcgggcgaatggcggaccaggcctgctcggcctgatagaaatcgttgtgaatatccaccggctgctcgctggtccacacctggcgcacggtgtcgaggaaggcgtcggtgcgggcgtagcgctggtcgtggtcgagataatcgccatcccggcgctgctcggcatcgttgccgccgctgatgatatgcaccgccaagcggccccccagcaggtgctcaagggtggcgaatttgcgcgcggcaagggttggggaaacaaaaccggggcgatgggccagcaggtactgaattttctgcgtcgacagcccggccagggccgtcaccagaaagccgtcgggttgatcggaccagtggccgaccagcagacgatcaaacccggcggcttcatgggtttgcgcaaagcgaacgatatagtcgcggtcaaagatcggccccaccggggcaatcgtttcggaagagaggcggtggccaatcatgccgagaaactgaatgctcatgaacaactccttgcgtcagggtaatggagtggccgcgacagcggcgctggtcattaccctatacagagcgtgttaatgagcaaaatgcatttttatcatatcttaatatgcttaattagcattaaacaaaaatgcatagtgctttcagtcggatacggtcagctgctgaaccactttgctggcaaaaaaggtcagcggcggctgcaggttcgccagatactgggcgtggatcagccacagtgagaccgcaggctgaaaatcgctgaggctgaggaccgcgacctcgtcccgccacgggctgctggccagcgccgccctcggcaccagacccagccccagcccctgcgccaccagcgctatctgcagctgcgagcccgcgctctcgacgttgagcgtcaaccgcaatccctggctctgcagctcgcgaatgagcccggcgcgcaggccacagccgtcggggttaaggatccagccccgttcggcgcactcccgcagggatgacgcgcgcaaattcaaacgccggccgacgatcggcaccacctccaggggacacagcaggcgcccgctgtagccctcggcgaagctttgctgggcgggccccatcgccagcatgccgtccagctcgccgttttccagccggcgctgcagctgtccgctccagccgcaggtgatctgcggcgacagtccgggaaactgctggctcagcgccgacagcgccgccggcagggcaatctcgctgagactctgcggcacgccgagacgcagcgcgccgcgcggctcgccttccggatccaacaggctgtagagttttttcgtctcacgcttaatgctcagacactgctcgtacacccggtgtccggcggcggtcagagtcagcgggcgggtctggcgctctaacagcgtgacgttcagctcctgttccagacgctgcaggcgccgggtgatggccgactgggtgatccccagatattccgcggcctgattgagggaggaaaactgcaccgtggccagcaaagcgtcgatatcgtcaatgcgcataggatccttatgtgaaatttgcatattaatatatgcgtaaattgcatttaaataatattaacgcctctgttagcgttttgaccagtccctctgacaggaaccgcacatgactgcaccacgactggaaaaattacgccatttcattcatgaggtagaccgcctgcaccgcgaacaccaccagaccgccccgctgcttgacgccgtggcgcagcggctggcggcgctggtgcgttacgacgactggctgccggaagagtacaccctgccgcatccgcaccattaccagcagtatctgctgcatgccgactccggggagcgcttctcgattgtcagcttcgtctggggaccggggcaagcgacgccgatccatgaccaccgggtgtggggggccattgggatgctacgcggcgcggaggaaaaccagcgctaccagctggatgccgatggcataccgcgcgcgctgggcgccgccacgcttctggaagcaggccaggtggagaaagtctccgctgacgatggcgatattcatcgcgtcagcaatgcgctggcggatcgcgtctctatcagcattcatgtctacggcggcaatatcggcgcggtgaagcgcgccgtgtataccccggaagggcagcagaaaccgtttatctccggctactctaaccgccatttacccaatatctgggattcctcccgcgaacatcaaggataaccactatgtccacctacgcttatcgccaggccgccgggatccgccaggcgctgctcgaccgtcgtgaactggcgctgatcgacgtccgtgaagaggccgatttcgccaccgctcatccgctgtttgccgtcaatctgccgctcagcaaactggagctggaggtccgccggcggataccgcgcttcaccaccccgctcaccgtctacgacaacggcgagggtctggcggagatcgccgtcgaacggctgcggtcctggggctatcaggatgtggccctgctggccgagggtctcgccggctggcgccgcagcggcggcgaactgtttcaggacgtcaactccgccagtaaagcctttggcgagctggtggaaagcgtgcgtcacacaccgtcgctcagcgcccaggaggttcaggcgctcatcgacagccggcaggaggtggtgatcgtcgacgcccggcgcttcgatgagtaccagaccatgagcatccccggcagcatcagcgtgcccggcggcgagctggccctgcgggtggagagcctgacgccctccccgcagacgccggttatcgtcaactgcgccggacgcacccgcagcatcatcggcacccagtcgctgatcaacgccggcgtgccaaacccggtccatgccctgcgcaatggcactatcggctggacgctggccggccagacgctggcgcaccagcaacagcggcaatacgatcccgccgcccgcgcctccggcgcccgggccgctgcggtggcgcattttgccgaacgggccggggtggcggtcatcgatgaggccacgctgcaacgctggctgcagcagagcgaccgcaccaccttcctgtttgatgtccgcagccccgaagagtacgcggcgggtcactatcccggcagcctgagcgcgccaggcggccagctggtgcaggagaccgaccacttcgccagcgtacgaggggcgcgcattgtgctgctggatgacgatggcatccgggcggcgataaccggctcgtggctggcgcagatgggctgggagacggcgcggctgagcgcgctgtcgaccagccagttgagcgaacgcggggtgccagccgccgaggtgccgcccggcccgcaggcggaggagataagcccggcgcagctggcgcaacagctggaagaacccggtacggtggtgctcgattttaccaccagcgccaactttgtcgctcgccatatccccggcgcgtggtggctaacgcgctcgcagctgcgccaggccctggacgtgatccctcccgcccaacgttacgtggtgacctgcggcagcagtctgctggcccgctacgcggtgccggaggtggcggccttgaccggtaaaccggtgcagttgcttaccggcgggacgctggcgtggatcgccgccggtctgccgctggcgcatggcgacagcggcctcgccgtcgagcgccgtgaccgctatcgtcgtccgtacgaaggaaccgataattccgccgaggccatgcaggcctatctggagtgggagtatggcctggtggatcagctggcccgcgacggcacccacggttttcgggtgctctagcgcgagcccgcctcaggcttcgcgcatgatccacgaatactgaaagctcttcggcgccggaaaatgggtccggcgccggtaggagcccagcgactgcggggtgcagtaggtacaactccccagccattcaacgctcgccggcgccacccccgcctctgcgaagatcgcttcggcaaaggcgcgcagatcaaaccacagattatcgctgccacgcgcggcggctttgagcggatcgctgaccgggcccgaacgggagtggaacagccgctggcgatggcgggccacccggtcaccgccgggctggtccagcagttgctgatagaatccggcggagacttcgtaacagcaggggtgaatatacggccccacggcgatgaccagatcggccaatgccaccccctgctggcgaaaacaggccagactgttgtcgacaataccgctgaccagcccctgccagccggcatgcacgctgcagacgtagcgaccgtcgcgcgaggcgatcagcagcggcagacagtcggcggtcaccacccccaccttttgcccggctaccgcggtaaacaccgcgtcggcgtgcgggcgcgtcggcagcggctgctgataatgatgaacctcattaccatgcaccagcttcaccggagccagctcggcataggtaaaggcggcggtttcatggacatcgagaaaagcgtggcggatgccagggatcgcattgagcaaacgggaggtgtaagccatagggacgataagcgtcagggaatgatgtcttaccttaggccaggggacgcggacaggcaaggcggcggcccggcatttttttaccagaccgccggatgcatatcagaccatggccgcgcgctgctggcgatgcatcagccagaacaccgccacgccggccagcacaatgcccggcgctgaggccgccatcaccccgacggtgccggtgccgagggccagcatcttgccggccagcagcgggccgctcatcgccccaagacgccccaccgccacggcggtgcccaccccggtggcgcggatggccgcgggataaaaaagcggcgccagagcgtaaagcacactttgtccgccggtggcgaacagcccggcgacaaaccccgccagcagcatgccagtcagcgacgacgcgctgcccagcgccagcagcgacgccagaatgccgctgtagatcaggagcgacatccgcagcggggtgagcttatccattagcgcccccagcagcagcgtgccgcaggcggcgccgatctgcagagagaacatcacccccgccgcctggctggcgcggaatccctggcccaccagcagcatcggcaaccagttgatcagcatatagaccaccagcagggtgaaaaaataacccagccacagcagcagcgtagcggcggcctggcccggggcaaacagggtgcgcagcggcacgctggcctccgcgcgctgaaacgcctgcgactccggcagccagcgcatcagcaacgggatcagcagcagcgggaccacgccgccaatccagaaaataatctgccaggccgcggcgagaccggaaaagcccagcgctgccgccagcgcggcgccaatgggtacgccgcagtacatcaggcttaccgcccggccgcggaaacgtgagccagcggcttccgaggttaaggcaatcaggttcggcaatgccgccccgagcccgacgccggtgagcaggcgcgccagcagcagcgtcgggaagctccatgccagcgcggtggccagcgagaacaggccaaacagcagcaccgaccccaacagaatgcgcttacgcccgtggcggtccgccagcatgccgcccaccagcgcgccgggcagcaggccgaggatcccggcgctgaagatccagcccatctgcattttatccagcgcaaaggcctgcgccatgccgacggcggcgatccccgccgcctgcagatccagcccttccatcagggccaccataaaacagagcccgatggtgaccaccaggcgcgagggggttgcagtcgttatcttggtcatagggtaccttggcgatagccgaacaaacggagcaggtgactggcggctgatgctttgtcagcagcacgttcttagttatttattgcggttaagcagatccagcgcgacgtcgacgatcatatcctcctggccgccgaccatccgccgcttgcccagctcgacgagaatatccaccgcgctgaggccatagcgcttggccgccgcttcgctgtggcgcaggaagctggagtagactccggcgtagcccagcgccagcgtttcgcggtcgacacgcaccgggcgatcctgcagcggccgcaccagctcatcggccgcgttcatcagggcgtagagatcggtgccatgctgccagccgagcttgtcggcggcggcaataaacacctccagcggcgcattgcccgcccccgcccccatcccggccaggctggcgtcaatgcgatcgcacccctcttccaccgcgacgatcgagttcgccaccccgaggctcagattatgatgggcatgcatcccggtggcggtctccggcttcagcaccgccttcagggcgcggaagcggtcgcgaatgtcgttcatgttcatcgccccgccggaatccaccacatagatacaggtcgcgccataagattccatcttcaacgcctgctgcgccagcgcctgcggggagatcatatggctcatcatcagaaaaccgacggtgtccattcccagctcgcgggcaaaggcaatatgctgcgcggcgacgtccgcttcgctgcagtgggtggcgacccgcaccacccgcgccccggcctgatacgccgctttcagatcgtgcagcgtgccgatgcccggcagcagtaaggtggcgattttcgcctggctgaccgccgccgccgccgcttcaatccaggcgatgtcgctgtgggcgccaaagccatagttgaagctggatccctgcaggccatcgccatgggccacttcgatggagtcgaccccagccttatccagcgcgccggcgatctgctgcacctgcgccagggaatactggtgacgaatagcgtgcataccatcgcgcagcgtcacgtccgagatataaagttttttaccgttcatgctgtcgctcccgccgcgctgtgcattgccccggccatttgctccgccgtcgccagcgccgccgaggtcataatatcgaggttgcccgcgtacgctggcagatagtgcgccgccccttccacttcgaggtaaaccgcggttttcaggccggaaaaacagccgacgccgggcaggttgaccggcctgtcctcggggataacctcaaactgcacctgctgcttcagccggtagcccgggacgtaagcctgcactgccgccgccatttcggcgatcgaggcggcaatcgcctcctgcgacgccagctcgctcaggatgtagacggtatcgcgcatcatcagcggcggctccgcagggttcagtacaataatcgctttgcccttgcccgccccaccgactttttcaatcgcctgcgaggtggtttcggtgaattcgtcaatattggcccgcgtgcccggcccggcggattggctggcgatcgaggccacaatctccgcgtaatgcaccttcgccactcgcgagaccgcggcgaccatcgggatggtcgcctgcccgccgcaggtcaccatattgacgttgccctgatggagattgtccgcgaggttgaccaccggtacgcagtacgggccaatcgccgccggcgtcaggtcgataacgcggatccccggcttcgcttcgcgcagcgcggcatcgtttttgatgtgcgccccggcgctggtggcgtcaaaaacaaaatcgatgtcggcaaattccgccatctgcatcaggccgcccaccccttcgtgagtggtcgcaacgcccaggcgccgggcgcgggccaggccatccgactgcgggtcgatgccgaccatcaccgccatctccagatgctggccgtggcgcaggattttaatcattaaatcggtgccgatattcccggagccgataatggcgactttacgtttacgcatcacgatctccttctccggcggcaacgaagcgtgccgcgactgagccaataccttcgatatgggcgacaaagctgtccccctcgttaatcgtcaccatcgggcctaacgccccggtcagcacgatatcccccgcccgcagcggttcgccgagactcgccagcttgcgcgccagccagactgcggcgttcagcggatgccccagacactcgctgccgcggccgctggagaccagctcctggttgcgggtcatgtgcatggcgcactgcttcagatccagtcccgccggacgctgcgccgggccgccaatgacgtacaggccgcaggaggcgttatcggcgacggtgtcgacaaagccgattgaccagtcgcgaatgcggctgcccaccacctccagcgccggcaatacccattcgatggcgttatacagttcatcaaaagtggtatcggcatgcggcagatcctgcttcagcaccagggcgatctcggcctccaccttgggctgcagcacgcggccaaacggcacctcggcgttgtcgccgtagcacatgtcggcaaacagggtgccgaagtccggctgattgacgcccagctgctgctgcactttgggatgggtcaggcccaccttgcggcccaccacccgccggccatgggccacatggtgctggacgttcaggcgctggatggcataggcggcgtcggcattgtcgacgccgagaatatcgcgcagcggggcgatcgcctggccgctctgttccgcgtcgcggagctgccgggccagcgcgtcaagagaaaaagtcatcatttactccttaagcccgtgcgaggaaattgagcaccagctgattaaaactgtcggcatgttcccactgcgcccagtggccgcagtcgcggtaaatatgcagttccgaaccggcgatcccggcgagcaggcgcaacccggcgtccatcggcacgaagcggtcattgcgtccccagacgatcagagttggcgcgctgatttcgcccagccgcgggccaaagtcaggaaactgcttcgggttggcttccaggctcttgacgaagttgtccagatggtcgcggcgcgacagcatattgttgagacgcgcctcgaacagcgcctcggtgaggtcgcgggtgtcgaagacgaagatgctcatcatctttttgaggttttcaatggtcggctcgcggtacagggcgttcagcagcttgatgccctcggtcggcatcggcgtgaacaggctcatgccgccggtccccccgcccatcagcaccagcttagccacccgctccggccagctcagggtgaaggccaccgcgctatggccgcccatcaagttgcccagcagatggactttatcgatccccagctgatcgaccacgcttttcagaatgcgggcgttgaggtccgaacgcgagccgctgttgacgatagcatcgcttttgccccaccccggacagtcgaggagcagcacgcgatagcccgcctcgaccagcgggtcaatattgcggctgaagttggcccagccggtggcccccggcccggagccgtgcagcatgaccacggtctctttcccgtcgccgcagtcattgatatggatacgcagcgtgcggcccccctcgtcgacattgaggaatcggctggtggcggcttcagtttgcggttgatagctcatgttagtctcccggttaatcaaatctcggtggtggcgctcagcgagccgaatccggcgatccactcggggatcggccggtaatagcggccttcactgcgccagcggccaaaagcggatagcgcggcaaaagcggccacccaggtcttaatttcgtgcgtcgatttcccggccatcgccgacagctcgtcattgccgatcgcgtccagttcgctcagccgcccctgctccagcaggctcataaagcggttgtcccagaccgggttgaggggatggagcgagtgcgggtcttcggtaaaccgtcgggcggcgctgatcactcgctgctggcgccgttcgcgttcgtccggcggcagctgctttccgccgccgagcaggcgatcgcgcagatgggcgtcggccttcgccagctccggcaccggcggctggtgcgagagtccgcccgagccgaggatcagcacccgcttattgagggtattgagaaagcggcccatcgcctcgcccagcagccgggtgcgttgaaaacccggcagcggcgcggcgacgccgttaataaacaccggcagcaccggcacgcggtccaggccacccagcagaaactccagcggctgggcgaagccatggtccacctgcatattgtacgacaccgccaggtcgataccgctgttgaggatggcgtgggcgcaggcttccgccagctcggcgggcaccggcaggtcgccggcggcgctggcgaagtcgccaatcgcggtggcgccgatgccgaggcagaacggcggcatcacgtcatagaaaaaaccgttgtagtgatcgggggcgaagagcaccaccagctctggatcgaattcagcgatccgccgccgggcgtcggcaatcacccggttcacttcatcgaggaccgcctgctccgggtccacgaatcccaccagcggagtgtgggagagacagtgcaaataggcatgcatatcaggccaccttctcttcagcgtgggcggtatccccggttgcgagggtcattttttccgccagagcggtcagctgcgcgccgagggtttgcgggatggcgagagcggcgacaaagcggtccggcctgaccacggcgatggcggtgttatgcagtgcaaaccagcttttgaggcggttttgcgtatcgcccacccgcagcgtgccgggggcgttatcctgctcgcggtggatctgcacctccggcaccacctggataaagcgcacgccaatcgcgcgccagcgggcgatctgcccggcgttgagcccccactgcgggttgcagccccagccgataatggcgaaattcgccccgataacctcgtcgagcagcacgctctcgccgctctccagcgtcacctgcggttgaataaacattttgcccaccggcgaggtcttgccggcgccgtcggtcagcagcgccccctcgcggtactgcggcatcggcttaaagcgcatctcgaggaagtagcgtttcaccggcggcaggtaattcagcagccaggagagaccgtcgcgcacggccccctgccagcgcttcggcggcgccagcacgtggccggcggtgaccgacagatcaatcatcgctttcgcgtggtcgcggcgctcctgctggtagctgtcgagcagcgcctctcccgctttaccgttgaccaccagcgccagcttccacgccaggttgaaggcgtcgcgcatgccgctgttgtatccctgcccctgccagaccggcatgatgtgcgccgcatcgccggccagcagcacccggttaatgcgaaagcgctcggcaaggcgggcgttatgcgtatagacccgctggcggatcagctcgacgcggtccgggtccggcagcactttgctcagcagacggcgcatattgtgcggctcgctgagctgagcttcggtttctccgggcatcaccataaattcaaagcggcgcacgccgtggggcagcgcggcggaaacgtagggtcgcaccgggtcgcagcacagataaacgtgcggagtggccagcgggtcgttagcgatatcgatgacgatccactgattcggcgcggtcttaccttcgaaggggatgttcagcgtacgacgaataaagctggcgccgccgtcgcaggccaccagccagtccgcgcgcaccgtctcccgttcgccgtccggtcctttaagatttaaagtgacactgtcaccggtctggctaaaggctcccacttcgcgggagaagaggcagcggacctgcgggaaacgctgcagaccgtgatacatcaccgcatcgacctgcggctgaatgaaggcgttgcgccgcgaccagccaaactcatcggtcatcggctggatatcggcaaagcagcggccttttggggtgagaaaacgcatggcgtgccacggcgtggtatgcggcagcacgtcattcaccagccccaccgcctgcatcgcccgcagggattcatcgtcaatgccgatggcccgcgggtaatcgatcagtgtggcgagcttttccaccaccagcacgctgatgcccatctggccaaggtagttggccatcatcagaccaaccggaccggcgccaacgatggcgacctgagcggtatgctgcacggcgggttgaatatcgggtgtagatgttgtcattctcagcgacctcacgactcggaaactgcccggctgacaggcaatttgttaatcatgtgtaaacgtatttttataatgggctgagtatagggcgggggttttcggctacaatcaaaacatcatcgaatgtgcaccaggtgcacaacactgtttttaaagcattttaatggaggatttatgcgtgacgatgagtccgcagcgtacaaaacggtgcgcggattaagccggggtttattgttattgaaattgttaaataaattcgacggcggcgcgacgccgggcctgctggcggagtttagcggcctgcatcgcaccaccgtgcgccggctgctggagacgctgcaggaggagggttttgtccgccgcagccgctccgatgacagcttccggttgaccattaacgtccgccagctgagcgatggatttcgtgacgaacattggatttctgccctcgccacgccgctgctcggcgagctgctgcgcgaggtgcagtggccaacggacatcaccaccctcgacgtcgacgccatggtggtgcgcgagactacccaccgcttcagccgactgtcgtttcaccgcgcgatggtcggacggcggctgccgctgctgctcaccgcctccggactgacgtggctggcctttgcccccgacgcggaacgcgacgccgtcgtcagcatgctggccgcccgtccggaagctgagtatcagctggcccgcgaaccggaacggctggcggcgatcctcgcccgcacccgccagaacggctatggcgaaaacttccgcggctggcggcaggaggagaaaatcgcctcgatcgccgtgccggtctgcagtcagcagcgggttatcggctgcctgaacctggtctatatcgccagcgcgatgaccattgagcaggcggcgcagaagcatctccctgcgctgcagagggtggcgaggcagatagaagcccgcatggaagaggaagaagtgtggtacgaaatgccctgatcgtgatgaggataaatgcgatcaaccattgcgcccggcttcgttatataatttaatacacaacgaattttcacgccattcgggccacaccatgtcaaaacaccccttactgctgggcctgacgctgctcagcgccagcctgttcaccggccaggccttcgccgaccgcaccgtcaccgaccagctgggtcgccaggtcaccctccccgaccacgtcacccgcgtagtggttctgcagcatcagacgctcaacctgctggtacaactgcatgccgccgaggatatcgtcggcgtcttaagcagctggcagaaacagctcgggccgcagttcgcccgctttatgcccgagatcgggcaactggcgaccccgggcgatctcacccaggtcaatattgaaagcctgctggcgctgcgtccgcaggtggttttcgtcgccaactatgcgccgccggcgatgatcgcgcagatccaacaggccgggatcccggtagtggccatctcgctgcgccaggatgccgccggggaaaaaaataaaatgaaccccaccatggctgacgaagagcaagcctataacgccgggctgatggaggggatccgccttatcggcgaggtggtcgagcgccagcccgaggccgaggcgctgattcactacaccttcgaggcgcgcaagcaagccaatgcgccggtggccgatattccaccgaaccagcgggtgcgggtgtacatggccaaccccgatctgaatacctatggcgctggcaaatacaccgggctgatgatggcgcacgccggggcgctgaacgtggcggccgccagcgtaaaaggcgcccgccaggtgtcgctggagcaggtgctggagtggaacccccaggtgatcttcgtccaggaccgttatccgcaggtggtcaaacagatagagaacgacccgcagtggcagacgatcgatgcggtgaaacatcaccgcgtgtggctgatgccggagtatgccaaagcctggggttacccgatgccggaggccctggcgctgggtgagctgtggatggcgaaaaaactctatcctgcgcgctaccagagcatcgatgtggacagtaaagccagggattattatcagcgtttttaccgcgtggcgtggacgccagatgcccgctaactctcagccctggctggtgcagggaagcctggcgctggcgacgctggggatcgcggtcgcctcgctctgtttcggccagtacccgttaagcctgagcgccgttggccacaccctggtccatctgccgccaggtgaaggggtgatcgggcagatcgtctggtcggttcgcctgccgcgcgtggtgatggccctgctggccgggggcgcgctggggctgtgcggcgccaccttgcagggcgtgttccagaacccgctggtggacccgcacatcatcggggtaaccgccggctccgccttcggcggcacgctggcgatcctgttgggcgtcggcagtctgctgatgatggcctcgacctttttcttcggcctcgtcgcgctggggctgatttacgccctcgccgccctgcaggggcgggacagcacgctggggctgattctgtccgggatcattctcagcggcttcttcgccgcgctggtcagcctgatgcagtacctcgccgacagcgaagagacgttaccgaacatcgttttctggctgctcggcagcttcgcgaccgccagctggcataaggtactgcttatgtccctgcccctggcgatggctgccggggcgctgtggaagctgcgctggcgtatcaacctgctggccctggaggaacgggatgcccgcagtcttggcgttccggtggccgcgctgcgtcgcggcgtgctggtttgctgcgcggtgctggtggcagcccaggtggcggtcagcggcagcatcgcctggatgggtctggtggtcccgcacctcgcccgtctgctggtaggggctgaccatcgtcgcctgctgcccaccgccttctggctcggcgccgcgctgatgctggtggtggacgatctggcgcgcacgctgacccaggcggagatcccgatcgggatcatcaccgccctgctcggggcgccgctgtttaccgtgttgctggtgcaatcccgacgccggagtacgacccgatgaacagctcattatcgctgcaagcgctacgctatggccaccgtcagccgctcttcgccccgctcacgctggcctgccggcccggtgagatctgggcggtgctgggcgccaatggccggggaaaaagcaccctgctggataccctgaccggcgtgttgccgccgctgggcggcgagatgcagtgcgagggcggcgtggccctggttccgcagtcgtttcgtcccgcttttcgctggcgcgtgagcgatgtggtgctgatgggccgggcccgtcacgtggatctctttgcccagccggacgaggaggatgcccggcgggttgagcaggcgctggcgcagctggggattgccgccctggccgaagatgacttcggcgccctctccggcggccagcagcagctggtgttgattgcccgcgcgctggtcagcgccagccagaatatcctgctggatgagccctgctcggcgctggacctcggtaaccagcaggtggtgctgcagctgatcggcgacctcgcccaccgccaggcgcgcaccgtcctgttcaccacccatgatcccaaccacgccctacaggtggccagccatacgctgcttctgctgccggagggccggtggctggcgggcgagaccgccgacgtgctgagcgaaacgcatctccggcaagcgtacggcctgccggtacgcctgatccgccatgccgcctccgccttccctctgctggcgccggggtttacgctgcgtcgctgaacggcataaaacccgcctgccggagatacccctggccaacgtcgccgaggataaagcgatacagggccagcgcggcgggatcggctctgagacgcgccagttggtaatcgcagcgaatattccacggcgccgggatggtcagggtacgcagatcgtcgcaggtggccagcgcggggccatagtgcgcatagccgataaacagatccgccagattctggcgaataagccacgcgccggctatctctcccggcggcacgctcagtgagtctctgccgccgaccagctgctgcgcccgcccggccatcgcgttgcccaaccctggatagcgtgcctcaattcgggcgaacagctgccaggtataatctcccgacggatcgcagcctggcgtggaggtcgccaaccgcaggcggggcgtgctgagcagcgccagccagtccaggccatcgttgtccggcgaccgccgggcggtcagcatcagctggttgctggcaaatccctggcattcctgcgccagacccgcctgcagcagcgcctgcgggtgcgccgcgttggcggaagcaaaaaccgcgcacggtgccccggcttcgatccgctcgcgcagcaggccggcagggccaaactgcgcatcgaccgccaggccagtgtgctgccgaaagtgcgccaccagcggcaggaaagcgcttctcaggcttcccgccgccagcagcgtgagagtggtgtttgccataggatatcgctataaaccggataatatagcgctatattacccggtttgccgtcgcgtcagtagcgaatttctgccagcgcacgcagctgctcgggggtggctaccggtaggtcaaaaaagcgcagataggcagggatcatttcaaacagcatgtcggtcccgcgctggatgtggcactgtcgtgcctgagcggccctcagcagcggggtgtactcctgagtcatgacgacttcccccacccaggcgcctggcgccagacgttcaacgtccagcggcagcggatcgctggccttcatccccagcggggtggcattgaccaccagctcgtgtccggcaggatcgggctgcatcagggtgatattgagctgcggatagtgctgatgcagccgcccggcgagggcgtgcgccacctcgggccgggtatcgtacagggtcagggcgctgacccccgccgccgcgagggaggcggcgatagccgatcccaccccgccgctgccaaccaccagcgcccgcgtcccctgcgggttaaaccctttacgacgcaggcccagcacaaatccctcgccatcgaacatgtctccgctcaggctaccgtcagcctcgcggcggatggcattgcaggcgccagcgatggccgccgtcgggctcaggcgctgcaccagatcgcaggtggcgattttatgcggcatcgtcaccagcgcgccgatgatgttggtcatcgtaaacagcggcggaataaacgcggcgtagtcctccggcctgacccccatcggcaccaccttcacgtccacctgctggtcaacgaaccacgggttgtagatcatcggcgccttaaaactggcggtcggatagccaaggtgcgctatcagccgcgtattcccactaatcaccatgccttgctcctttgcttactgcgataactcgatacgtttgacgtcgccgaggataaacagataggccaccacgcccagcagcgcggcgccgccgatgtagatcaaggcgtagaagaaattaccgaacccggcaacgataaagccgatcaccagcggggtgaggatccccgcgaggttggcgcagaagttaaacaggccgccggtcaggccgcccagccccttcggggcgatatcggagatcagcgtccagccgagacccaccatcccctggccaaaaaaggcaaacgacatcaccaggatcaccgccaggtcgctctccagccagttggcggtaatgatgcagctggccatcagcaggccggcaacgatcggcagcttacgaccgaggttggctgacccggtagctttcagcaacttgtcggagagccagccgccaaacatcaccccgccggcggcggcgacaaacggcaggatggagaagaagccaaccttcagccagggcatatgccgctcggtggccagccaggtggggaaccaggtgagaaagaacaccagcacggtattgccggcaaactggccgatgctggcgccgatgatctgccgtttgctcagcagctggcggaccagcggccagctgaacgccacctgctggtcggtcggggcgctgaggccgccgccgttttcgatatgctcgcgctcctgctggctaaggcgcggatcttcatgcggttcgcggtagcagcgccaccacaccagggcaaacagaatgccgacggcgccaacgctgacgaacagcacccgccagccgaaaccgtccatgatccagaacagcagcggcgcaaagcaggccagcccgagatactcccccacggtgtacaccgccgtggccttcgcccgctcctgctgtgggaaccaggcgctgaccacccggctgttgaccggaaagcacggcgcttcgctaataccgagcccgaagcggcacagcagcagcgtcttcagccccaccgccatgccgtggaacagggtaaacagcgaccacagcgtcagtgacaaaaagtaggtcactttgttgccaaagcggtcgagaaacaatccgccggggatctgcgccagagcataggtccaggcgaaggcggagaagaggattcccatgatcgccgggtcgatccccagctcagcggtgagctttggggcggcgatccccagtacggtgcgatcgagatagttgatcatggtgccaatggccaacagcgcaagaatgccgatacgccgccgggagcggcgcacggtgacggctggctgggcggcagccgtcgggttagggctatatgagctcatagtcggttcctgtctcgggtacagagggtgttgttattgtgtttaacgcataatgaaccatttgattcaggctaacaatactgcatcgccgccagacggacggccgcattcgctgcgccatagagcgcatagccagcccggcgctcggttaactcaaagaaaaagcggccggcggtaaacggccgggtgtaaagatgcaggaaatctcccccctgcggatcgcggtcatagaggagctgctggcgctgaagctgcccgacgtccagctcgccgccaaagcgcgccagcagatcgtcataataattggccgggatcggcagcgtatggcgggcaacctcggcaagctggtcgcaggcggccggcagatcgcggcaggcaaaggcggcatgctgcagccccgccccctggtagcaagcgacggagcgggcgatctgcgtcgtccggctctgcgaaatattcagcgccagacggatatcgccctgcgggctgcgcaccgccaggctgcgcaccagtccatacgggtccggcagcgtctgctcatgctcaagggaaaaaccaaacaccgtacggaagaacatcacccagttatcgcggctgtcggcctccattcccagcgccagatgatcgataccgagataatcctcgcgcaccgtcacgccatcacgcagatgaaaatcgcgctcgtagatagcctccccggcgtcgatgagatagataaggctgccgtcgggggcgcagatcgccgggatcggcgtttcgttcggcccggcgtcgccctgccaggtggcataccccagcgcgcgggcgcgggcgacaagcgacgcgctgtgctcgacccgcagcgccatcgcgcagagcgataccccgtggcgttgataaaaatggtcggcccagctgtgcggctgatggttgatgacgatccgcgccccgccgttgcgccacagcgtcacctgtctggagcggtggcttccctcgtgctgaaaacccagcgcctgcagatgttgccccaggcgctgcgcctcggcggcgctggcggcgaattcgataaactccagcccgtgatagaccggcagcggcggcggtgaaaacagatcggcatcgcacgtcgggagccgacggcgggtttgctcctccagccacagcagcgaacgataaccatctttggccgtcgcgccgttcggcgaggcgcgaaaaccgtcattgaagatctccagcgaccaggggccgcggtagccacagcgggtgatctgctcggcaaacgcctccagcggcagctccccctgtccgggaaagcagcggaagtggcggctccactccagcaaatccattttcatatacggcgcatcggcgagctgtacaaaggtgattttctccaccggcaccgacggtagcgcgtccagcgtgtcgccgcgggccagaatatggaagctgtcgagcaccaggcccaacgccgggctgtccacccgccgcacccgctcccaggcctgctgccagcggttcacatgggttccccaggccagggcctcatagccgatagcgatcccctcctcttccgccagcgtggccagcgcccgcaggtccgcgacctgcaattcgctatccgccgagcagtccggctgtacattgctgcacagcagcagcgtctcgcagcccagctcgcgcatcagagcaaacttgcgccgagcgcgggccatattcgtcgcaaactgcgcccgactggcgccttcaaaatcgcgaaagggttgaaaaagcgtgatttttaaccctaaatcggcggcaagctggcggatttccgccggcgtccccgtataatagagcagatcgttctcgaaaatttccaccccctgataccccgccgccgcaatagcgtgcagcttctcaggcagggtgccggaaatcgaaacggtggcgatagagcgcagcataaggtcctcgggtcaacagctgacgtaagccttgaatatgtatcatttggttcatttgcgccataccaggttgctaaattgtgatcattatgtgtattttttgtcacccaagaaaaaggagttgccatgaccgtcgttgcccatgatgaagcacaatccctgaaggcgcggatcttcagcgccgctatcgctgtctttgctgaacacgggctgtcaggcgcccgcatggagcagatcgccaccgaggcgcagaccaccaaacgcatggtggtttactacttcaaaagcaaagaacagctctatcaggaggtgctgcagcatgtgtatgcgcggatccgcgaaaccgagcagcagctggggctggagaatgtgccgccggtggaggcgctggtgcggctggtgcgctggagcgtgcgctatcacgccacccatgcggactatatgcgcgtcatttgcatggagaatatgcagcgcggcaagtggttaaaaagctcgggtgaactgaagccgctgaatcgtaccgccctgtcgattctggaagacattttactgcgcggccagcagcagggcgtctttcaggcggggctcgacgcgcgcgatgtccaccggttaatcagcagcttcagcttttatcaggtgtcgaacttctacaccttcagcagcctgtatcttgacgatccgctacccgccatcgacgatgaagcgatggtggctcaccattgtgacattgccgtcagggcggtgatccgcttcgtgatttcctgacccgccggcgcaagggatcagtgcccggaaagcgcatgaatgactttctccatggcctccacggtgagcggcgaacgctggattttgcggttcgccagcgaggtgcgcagcacaccggcaatgacaatgtgtttcggctcctgacccaggtcacgcatttccagcacgactttacccaccacgcggcacatttcctggtacaggtcgtcgtctttcgctttatttcccatagaatttggctcgtattttatcattatcaatcaaatcattattgatagatttgccgcacaacgcaaaccatcgccactttaaaggttcaatgacgcattttaccggctcatgatggcgaaataatccatttcttttactctttttcatagccggtgacgaaaaagtgtgttgcgtagatttttgcataacgtgccggttttgttacgcgttttgtccataatttgaaacgaggtttttattttcctttttgatttcggcagcgtataatgcgcttcgattctttcttgaatggtttcagcgcattggactgcatgataaaacgcataacaccttgccacatttcatgggctgaaccgccagcacacattcttctgcacgcttcagggttgtcacctatccttagggcgtggcttagcaactttcgtaatacaggtttggctccccggcagtgcgcccgcggagcgagaattccatatccttcacaacttaaagactaaaactgtcatgaaaaagaccaaaattgtttgcaccatcggtccgaaaaccgaatctgaagagatgctgaccaaaatgctggaagccggcatgaatgtgatgcgtctgaacttctcccacggtgactatgcggaacacggtcagcgcatccagaacctgcgcaatgtgatgagcaaaaccggtaagaaagccgctattctgctggacaccaaagggccggaaattcgtaccatcaagctggaaggcggcaacgacgtctccctgaaagcaggccagaccttcaccttcactaccgataaatccgtcatcggcaacaacgaaatcgttgcggtaacctatgaaggcttcacctctgacctcgccgtcggcaacaccgtcctggtggacgatggcctgatcggcatggaagtcacggctatcgaaggcaacaaagttatctgtaaagtgctgaacaatggcgacctcggcgagaacaaaggcgttaacctgccgggcgtctccatcgccctgccggcgctggctgagaaagacaaacaggatctgatcttcggttgcgaacagggcgtggacttcgtcgcggcctccttcatccgtaaacgttccgacgtcgtcgagatccgtgagcacctgaaagcccacggcggcgaaaacatccagatcatctccaaaatcgaaaaccaggaaggcctgaacaacttcgacgaaatcctcgaagcgtctgacggcatcatggttgcgcgtggcgacatgggcgtggagatcccggttgaagaagttatcttcgcccagaaaatgatcatcgaaaaatgtatccgcgcgcgtaaagtggttatcaccgccacccagatgctggactccatgatcaagaacccgcgtccgacccgcgctgaagccggcgacgtggctaacgccatcctcgacggcaccgatgcggtgatgctgtccggcgaatccgcgaaaggtaaatacccgctggaagcggtcaccatcatggcgaccatttgcgaacgtaccgaccgcgtgatgaccagccgtctggacttcaacaacgacaaccgtaaactgcgcatcaccgaagcggtgtgccgcggcgcggtagaaaccgctgagaaactggaagcgccgctgatcgtggtcgccacccagggcggtaaatccgcacgcgctgtgcgcaaatacttcccggatgccaccatcctggcgctgaccaccaacgaaaccaccgctcgtcagctggtgctgagcaaaggcgtggtaccgcagctggtggaagagattgcctctaccgatgatttctatcatctgggcaaagacctggcgctgaagagcggcctcgcgcgtaaaggcgacgtagtggtgatggtttccggcgcattagtgccgagcggcacgactaataccgcttccgtacacgtgctgtaataatttacaggttaattggttttttttaataaagcgcctcgcggggcgcttttttttattcattgattagctcttcctattaaaaatgcaaatcggaatttactatttaataagggattatctaagatgaatccgatggaagcgcgctgttttcactcgcctttttcagcgattctgagcaattcgatgcttctttgagcgaacgatcaaaaataagtgcgttcaggtaaaaaaaatattctcatcccaaaaaactttgtgtaatacttgtaacgctacatggagattaactcaatctagagggtattaataatgaatcgtactaaactggtactgggcgcggtaatcctgggttctactctgctggctggttgctccagcaatgctaaaatcgatcagctgtcttctgacgttcagactctgaacgctaaagttgaccagctgagcaacgacgtgaacgcaatgcgttccgacgttcaggctgctaaagacgacgcagctcgcgctaaccagcgtctggacaaccaggctcactcttaccgtaagtaagagttctggtaataaaaatggcgcactctgtgcgccattttttttgccctcagcatgagggctattgggtaagcagaccgttgtcagacgaactattctgcgccgacagcgacgtcgccgtgctacctgcccccgccgacaccaccaccggataccccgcccttctcgacatcgcttttttcaactgcaggtcatccactgctttatcctctgcgaaggcgtgaaacgccgctggcagcgtgtaagcgatggtccgggtgttttccccttcggtctgcgaaagcggcctgtggacttcgacatagcgtttaccatccggctcgacggcaaacttcaccggctgattgataatccgtaccggcgtcccggttttcacctggctgaacagcgctttgatgtcatcagcgttcatccgcatacagcccgagctgacgcgcagaccaacgctgtctggggcgttagttccgtggatgagatattcaccgttaccgtaggccagacgcagcgcatagcggcccaggggattgttcggtccggccgggaccaccgctggcagcgtcacccctttctccagcgagcgcgcgcggatgccggcggtaggcgtccaggtagggttagggatcttctgccccacgcgggtggtcatctccggcgtttccagacctaactggccaatgcccagcggatagacctgcacctgattctctcccggcgggaagtaatacagccgcagttcggcgaggttgacgacaatgccctccctcggcacgtcgggcagcagcatctgagaagggataaggacctgagtgccgggcttcggctgcactggtgcaatcgtatcgttggcttcgaggatcagcatcgccgcggtatcgaaatggcgcgcaatcgcctgcaggttgcgatctccctcctggaccgtccagtactgattctgaccaatcagccgactgttggcgggaggaagcgggtaatcaacggcccaggcggccgtggaggcgccaagggcgctgagaagggctaaggtgatcatcgttttgcgtttcatactgagattccttctttcgctgataaaacgccaggagactgaacggcggcagggtcagcgccctgccggacgtaacagaatgaaatctacctgtttattctagctaatatttgccgctttcgcgcgtatcgcgcggatcatggcttcgaggccttgcgagcgggagggggtgagatgctgggtgagcgccattttttcaaaccacggacgcacgtcgaactcggtgatgtcctgagcggtcatccggtcatagaggataaataccaccgctatcagacccttgacgatcgccgcatcgctatcgccgcgcagggcgatcacgcctgtgggatcctggtccatcacgatccagacctggctttgacagccctgaataatgttctgcacgctatgttcttccgggcttagcggcgccagacgctggccaagctcgatgatatagagatacttctcttcccagttggcgcaacggctaaagttacgcaacagtttgtctttgtccggtagtgccgccattgtcccgtcctttaccctaacagtttgcggatccgctggaggccggccaccaggcggtccacctcttccgtggtattgtacatcgccagcgatgcccgacacatagccggtacctgataccgggccatcaacggcatcgcgcagtggtgtccggtccgcacggcgatcccgtagttatcgaggaagctgccgacgtcataggcgtgatgctgaccgaggttgaaagcaattacccctttacgctgcgccgggccgtaaaggatcagatccggtaccgcgcgcagggcatcgagcgcgtagcgcatcagcgtctgctcatactcggcaatctgcgtcagtcccagctggctgacgtaggtcagcgccgcgccgaggccgatgatccccccggtattcggcgtgccggcctcaaagcgccacggcgcctgattccaggtggtgccctccgtcaggctgacggtggcgatcatcgacccgcccccttcccaaggcgccatcgtctgcagcagctcggaccgggcgtagagcacgccgatcccggtcggcccgtacagcttgtgggcggagaaaacataaaaatcgcagcccagcgcctggacgtccaccgggtggtgcatcaccgcctgggcgccatccaccagcactttcgcgccatgctgatgcgcaagagcaatcagcgccgccagcgggttttccgtccccagcacgttggagacctcggttatcgccagcaggcgggtgcgcgggtcaaacagtcccgggacaacatccagttgcagcgtaccgtccgggttcagggggatcacccgcagctcagccccgacgcgggcgcacagcatctgccacggcacaatattggcgtggtgctccatttcgctgatgatgatgttatccccggcgccgacgttggcgtttccccagctgttggccaccaggttgataccctcggtggtgccgcggacgaacaccacttcctccgccgacccggcgttaaggaaggtggccgcctgctgacgcacggcttccatccgcgcggtggcttccgcgctgagggtatggatgccacgatgcaccgccgcgtagccgtggcgatagaattccgcttcggcgccgatcactgcctccggcttctgggcgctggcggcgctgtcgagatagaccagcggctgaccgttgacctcccggttcagtaccggaaaatcggcgcgaacctgttctactgaaaatgtcatacagtgcctcccggcaaacgctgtccaatacgcgccagcacctgctctctgagcgcgtcgctgcggatagcctcggtgagctcggcggcgaaggcgtagaggatcatctgctgcgccgcctgctgttcgataccgcgcgagcgcagatagaacagctgctcttcgtcaatgcgccccaccgtcgccccgtggctgcatttcacgtcatcggcgtaaatttccagctgcggtttggtgtcgacctccgccagccgcccgagcagcagattattgttggtcatctgaccgtcggttttcagcgcgagcggcgcgacgttgatcagcccgttaaacaccgcccgccccttatcgctgacgatggttttgtgcagctggcggctggtgcagtagccgacctgatggtcgagccaggtgcggctatcgcagacctcatttttcaccggcatcgccagcgaattgaggcgcaggttgctgttttcgccgcccaggcgggtgctggtctggtgacgcagcacctggccaccaagcaggaaactgctgctgaaggccgaggcgtcgcggcccagcagcaggtcgttatgggcgaagtgatagctgcgggcattctcaaatgccagcttgatatgctggaggtgcgcgttatcggccaccgtcatggtcaatcgcccgccggtgaaatgcggctgctcattgaggctcaggtaatgctcgacaatcgtcgcctccgccccgctctccagcgccagatgatggcgatagtgggcggtattcagcgcatcgccggccaggccactggtgatatgcatcagcagcagcggtttatccaggcggcggttgcgcggcacgcgaatgcgggtcaccgtctgggccaggctttcggtcagatggagaaacacctccggctgcagggcatccggcagatgctggcgctgattatcgacactgacctccacgccgctggcggcaagatcgtcgctcagctgaggatgatagcggccatcgataaacaccagccgccaggcgtccagcggcagcgccagcgcatcacgctgttcagcactgagagaggctccctcatcggcgacaaagcgaccgttaagtagggcatccagcggagtgtatttccagtcctcgtgcttgcgcgtcggcagcccaaggcgcagcagctgctgcagatgctgactggcctccggggtacgcgggccgccctgcgcttcaaacagatggtgccactgctgcagcgcgttactgctgttcggtaagccagccatagccctgctcctccagctgtttgaccagagagaaatcgcccgacttcacaatccgtccctgatacagcacatggacatagtccggcttgatatagtcaaggatgcgctgatagtgggtgacaatgataaaggcgcgtttgccgtcgcgcagggcattcactccctgcgagacgattttcagggcatcgatatccaaccccgaatccgattcatcgagaatgcacagctccggctcaagcaccgccatttgcagaatatcgttgcgctttttctcaccgccggagaagccaacgttcaccgagcgggtcaggagatcttccggcatctgcagcagcttgatcttttcttccattaagtcctggaaatcgaaacgatccagcgcctcctggccacgatagttgcgcacggcattcagcgcagtctgcaggaaaaactggttgctgacgccggggatctctaccggatactggaaggccataaagataccttccccggcgcgatcttccgcagcgagttcgagcaggtttttgcccttaaattcgacgcgaccgccagtcacctcataatcttcacgcccggccagggtggccgaaagcgtacttttacctgagccgttcggccccataatggcgtggacctctcccgggcgcacctcaaggttcagcccgcgcaggatcgctttatcttcgacggcgacgtgtaaatcttgaatacttaacatcttttttccttaattatcagccgacgctatgctcaaggctaatggccagcaatttttgcgcctctacagcgaactccagcggcagctcggagaagacgtctttacagaaaccgttgacgatcatcgagatggcatcgtcttcgctaatcccgcgctgcaggcagtagaacaattgatcttcgccaatccgcgaggtggtcgcctcgtgctccagctgggcgctattgttgcggcattctacatacgggaaggtatgcgccccgcagtccgggccgatcagcatcgaatcgcactgggtatagttgcgggcgttggtggcggtcggcatgattttgaccagcccgcgatagctgttctggctgtgtccggcggagatccctttcgagatgatggtcgagcgggtgttcttgccgatatggatcattttggtgccggtgtccgcctgctgatggccgctggtcagcgccaccgaaaagaattcgccgatcgagttatcgccgcgcaggatgcagctggggtatttccaggtgatggccgagccggtttccgactgggtccatgacattttgctgttctccccttcgcacagggcgcgcttggtgacgaagttgaggatcccgccggtgttgttatcgccggggaaccagttctgcaccgtggagtatttcacttccgcgtctttatggatgatgacttcaacgaccgcggcatgcagctgatagctgtcgcgcaccggcgccgagcagccttcaatatagctgacgtagctgccttcatcggccaccagaatggtgcgttcaaactgcccggtcttttcggcgttgatgcggaaataggtcgacagctccatcgggcagcggacgcccttcggcacatagataaaggtgccgtccgaagccactgcggcgttcagcgcggcaaagaagttgtcattccccggcactacggtgcccagatactttttcaccagttccggatggtcgtggatcgcctcgccgaaagaacagaagatgatcccctgctcggccagcttttctcggtaggtggtcgccaccgacaccgagtcaaatatcgcgtccaccgccacctcgcgcccttcgcgtaccggcacgcccagctggttaaaggcttcttccacctcgctggtcagaaaggtattggccccggtctgctgcaccgcgccaggctcggaggcgcaggtctcatcgcagttgccgcaggagggcgcggaatagtagctgtaatcctgataattcagcttatcgtaatgcgctttcagccagtgcggctcctccatttccagccacgcccggtaggcattcagacgaaactccaacatccactgcggctcattgcggcgagccgagatagcccgaacgacttcttcattaatgcctttggccagctcatcggtttgcaggcgagtaaaaaagccctctttgtagttgagcgggccgccggtccaggttttgacatcgtcagttgcttcagtattacgcgacatagttactccgcctgcaccccaaaactttcgccgcagccgcactcatgctgcgctttcgggttatgaaatttaaagatttcatttaaaccttcccggacataatccagctcggtgccgtcgatgaacggcatcgcctgcagcggcgcaaacagcttcgccccgtcagattcaaagagcagatcgtcgggcgccggctcggcaatcatttcgagcacatagccaaaaccagcgcagccgctggttttaatgcccagccgcagccctttcttatccggctgcttgcgcatcagatcgcggatatgcgcggcagcggccggcgtcatggtcagtccctgccagctgaaatcggcgggattaaaagttcctgcttgtacttccatcgatagacctccaggttggcgccatcaaggcataccgccatgttagtgataatgattatcacttcaacccttctgcagcaggggtattgcctcatttagtgctttttataagcatagaccctcgcccggggattatcagggcgtgcaaatagaacttaatgcattgatttataatatgttattttgaaatcattctatctccgcacgcaatggcaaagatgtatcgaaaataccgatttatgcaatagcggcagaccaccttgctggttatccgttgcaggcgagcataaagtgacaacgtaacagaaagaccatgccagcgcggggcgcagccccggccatgcgctagaaaaaagcgggtagtgaaagcgcccgccggtaacgcttcaggaaaggaataagcgccgctcgcctggccgcgttcgggaaataaaaccaaaataaaacgggcaaacggggctgccaggcgggataccggctggctaggtgcctttactcaccagccgggcggcctggacaaagacctcatcctctaccccgtcccccttctgtctgcccagcctcaccagttcatccacgatactcccctgattaatctgcttttgtgtagccactaagctaatgaccgccgcgccgatggccatgccaatcaatgccgtttgttcatctttatctttcatggtgtcgctccgtctgccctcctcagaaaggctagcaaaagataccatctgctcaatttcaaattcatcttctttacacctcccggaaaacgcaggcgccgcactgacctctccttccccctggtggcgatggcgcaaagcgctgtcgcctcataccgggtctttattttgccagcttcacgttgcgcggaaataaataaaaataacgcgcgcgccgaagagtaaaaaaaggaaatagcagcctcagcgataaaaccagattattccagcagggaatagctggaatgctaatatttcatttcctcgccggtttttagaggcctatagtttttttacctgcagaacatccactaaggttaaaaaacataaggacataataatgattgtttcagcccccagcgattatcgcgaagccgctcgtcgtcgtctgccccgcttccttttcgattatattgacggtggcgcggtggcggaaaacaccatgaacgccaacgccgccgagcttgcctcggtagctcttcgccagcgcgtactgtgcggggccggcgaaccgacgctggcgaccacgatccttgatgccccatgggcgatgcccgtggcgctggggcccgtcggcgccaccgggatgtacgcccgccgcggcgaagtccaggcggcccgcgccgcctcccgcgccgggatcccgtacaccttatccaccgtgtcggtctgctcgattgaagaggtggcgagccacgccagcggcgcgctctggtcccagctgtacgtgctcaaagatcgcggctatatgcgtaacgcgctggagcgcgcctgggccgctggcatgaaaaccctggtatttaccgtcgatatgccaatccccggctcgcggtatcgcgataaccgctcagggatgtccgggccgcacgccaccctgcgacaatatctccaggcttgcacccatccgcgctgggcgatgaacgtcgggctggcgggcagacccctgtcgtttggtaatatcgaagcctacaccggccacaaaatgaccatggacgactatatggggttcatcagcaacaacttcgacccgtccatcgcctggcacgatctggagtggatccgcgacagctggcaaggaaaattaatcatcaaagggatcctcgatgccgacgatgcgcgcaatgccgtgcggctgggcgccgatggtattgtggtgtcaaatcatggcggcagacagctcgatggcgccatccccaccgcccgggcgctgcccagggtggtggatgcggtcggcgacgatctgacagtgcttgccgattccggggtgcgctccggcgtggacgttatacgtctgctggccctcggcgcgaaaggcgtgctgctcggtcgggcctatatttatgccctggccgcggcgggcgaagcgggcgtggcgcatctgctgcgcttatttgccgaggatatgaaggttaccatgaccctcaccggcgcgacctcgccatcggccatcagcctcgattgccttgatcgcctcgaacaggatcaacaccgcacccatgcggtgccggtatccttacccgcctgaccctgcccgggacctggcctggccatgtgcctcgcccaggtccggcaaagtggaattacctctgaaggtgcaactctgtctgttgtaccgtgttctccggacggatgcggaaccagatcgcgtacatggccggcaggaagataagggtcatgatggttccccccagcgtcccgccaatcagcgtataggcgagcgttccccagaagaccgaatgagtgagcggaatgaacgccaggatcgccgccagcgcggtcagcagaaccgggcgggcgcgctgcaccgtcgcctccaccaccgcgtggaacggatcgagccccgcctgttggttatgatggatttggccaatcaggatcagcgtattgcgcatcaggatccccgacagggcgatcaggcccaccagggcattgatgccaaacggctgattgaacagcagcagcgtcgggaccacgccaatcagccccagcggcgcggtcaggaaaaccatgaccatcgccgacagcgaacgcacctgcaggataatgatcagcagcgtgagggcgatcattatcggaaataacggcaccatcgcccgggtggccttgccggattcctcaatcgaccccgccgtctcgatgcgatagccaggcggcagcgagtcgataatgggctgcagcggcttcatcagcgcggtggagacatcaggcggctgcaggttctccgcaacatctccgcggacggtgatggtcggcgtgcggtcgcgacggcgaagcagcgggtcctccatcctgatcgacacgtcgccaatctgtgacaagggaacccgctgcccgccgctgcccaccagggtgaagtcggcgattttcgccggatccagacggatgtcgcccgccgcgcggccgatcacctgcacggcgcgaatatcttcccggacggtggtgatcgggatccctgacagcaggaactgcagctgctgggcgacggactgggagctgagtccgctcgcctgcagccggtcctgattgaggctgaaatgcatcaccggtacccgcgaaccccagtcggtattgacggtgcgcatcagcggactggcctgcagcaccgatttaacccgctcggcgatgtcgagcagagcgtgcggatcgggccccatcacccgccaggcgaccggataaggcgaataagggccaaacaccagctgagtgacgcgcacccgcgcctccggcgccaggccattggccaccgcctcccgcagccgccgcttgagcgcctcgcgggcaccctgcccgtcggtcaacaccaccagtttggcgaaggagggatcgggcaattccggagccatcgccaggtaaaagcgcggcgcgccctggccgatatagctggtgacaatcttcgcctccggctgccgctgcagccagtgctcaattttcgccgccgcggcgctggtctggctaatcgacgacccgtaaggcagctgcacttcaaccagcacttccggacgatcggaggtggggaaaaactgctttttcaccacgctcatgcccaggatcgccacgataaacagcgccaccaccccggcggccacgcgccatttgtgagcaataacccgggtcagcagccgacggaagcgctgatagcgcggggtgtcatacagcgcggcgtggccggccgccgcgggctttctgtccggcaacaggtgcacccccagccagggggtaaaaatcaccgccaccatccaggaggcaatcagcgcgataccgacgatccagaacacattgctggcgtactccccggcggtggactgcgcaaatccattaggcataaaacccacggccgtcaccagggtaccggccagcatgggcgccgcggtatggctccaggcataggccgaggctttgaggcggtcgtacccctcctccatttttaccaccatcatttcgatggcaataatggcatcatccaccagcagccccagggcgaggatcagcgagccgagagtgatgcggtcgaagtttttgccggtcgcctccatcaccacaaacaccacggcgagggttaaaggcaccgccgccgcgaccaccacgcccacgcgccaccccatgctgacaaagcacaccgtcatcaccaccagcagggcgacaaagaatttgatcatgaactcatcgaccgcggcgctgatattcaccgactgatcggtcaccttggtcaacgacatgccgagcggcaggctctgattgatgctggtcgtttcggcgtccagcgctttccccagcgccagaccattccagccctcgcgcatcaccacccccagcagcagcgccggttcgccctgatggcggatcaggaaggtcgcgggatcttcatatcccctctcaaccgtggcgacatcggccagtttcagcgttctgcccccggcaataatcggcgtgtcgcggatctgctgcaggcggtcgaacgccccgtcgaggcggataaagatctgcccgccccgggtctcgatagccccggcggcggtcagcacattctggctgttcagcgcggcaaaaatcgcctctggtgaaaggcccagggtggcgagacggtcatgagaaaacgagagataaatgcgctccgcctgttcgccgaggatattcacttttttcaccccgggaacatgcagcagctgctggcgcagggcttcggcgtcacgcaccagctgccgcggcggttctccccgtgctttcagggcaaagagggcaaaggtgacatcggcgaattcgtcattcatcatcgggccggagacgccggcaggcaggtttttcgcctcgtcgccgagctttttgcgcgcctgataaaactgctccggcacctcggaaggcggggtctgatcctgcagcgacagggtgatcaacgccatgccagggcgggtataggtctccgtgcgatcgtaccactttaactcctggagccgtttttccagcggctcggcgacctgatcctgcatctcctgcgcggtggcgccgggccagacggtaatgaccgtcatttgcttgaccgtaaagggcggatcttccgctcgcccgagtccgaagaacgccaccagcccggcgacggcgataaggataatcaaaaacagggtcaccgaccgctcgcggacggccagcgcggagagattaaaacgcccggcgctcatggctggctcccggcggcattatgctcgcgtcgttccgccagacgcaccgcctcgccctggtgcagaagatgggcgcccagggcgacgatcggctcgccgggcttcagcgggccggtcacccgcgcggtttcatcatccaggccgagcacagttaccggttgccaggagacggtggccggacgagaggcaatgcgccagacgccagggccattacccggatcgtagaccgacgccaggggcaccgccagcacctgtcctggcgcctggtcgttgccgatgcgcagggtcacggtagaccccagcggggcattcgccagcgcgccgttcagtacatagcgcgcttcaaaggtgcgggtggtggcgtcagccgcgtccgaaagcaggcgcagggtcgccgtgaccggctgagattcgctgccatagcgtgtcgccagcgcctcgctgccgaccgccgggcgcagcgtctccggcagttgcacccgcgcttcgcgctgccccgcccgcgccaggcggatcaccacctgcccggcgctgaccacctgccccggctcagcgagggtttccaccaccacgccgtcagcatccgccagcagtccggcatagccggtggcgttttgcgccacattggcctgcgcctgggccgcgctgaggtcggctctcgccgcctctgctgccgcgttaatctggtcgaattccgcggcagagatggcgccgctcgccaccaggccgcgatagcgggccagatcgttggccgcctttttggctcgcgcccgcgcggcatctacggcccgctgttgggactgcgcctgcaaggctagatcagccggatccaggcgcagcagcagctgaccacgcttgacgctctgcccggtttccacccgccgttcaagcacttttcccgccaccctgaagccgaggtcgctttgggttcgggccactaccacgccggtaaaggcccgcgagccgacctccgcgcgctcgacggtcgccacccggaccagcggcggccggatgcgggggtcgtcatgatcggcaggttcgccgcagcccgcgagggccagcggcaggaggcagacggcaagatggacggcgttgagcctgagcatgggtcaccttaatgaaaagaccggatggtgaccgcattctcagactagtgaccaataaagtcaatagtcactaatcagggggagagacttctcaggatcagggaggcaagcagcaccgcagcggtgggcgcggtgtcgagattgtattgcaactgcaccggattgatgaaaggacacatcaccatatacaccgccagggtcgcttcatccagcggggttttgcgctcgaactcacccgcctggcggccttcgacaaggatttgaccaatcagctgctgcagatgaccggcatactgttccgttgaaggccatttatcgcgcgccgcgacggcggcgatgtcgtacagtttgcgatcctcgaaaaacagttcactgccggcctcggtcagcgcccggaacaggcggcgcagtttctcgctggcggacggcgcatcggcgatggccgcgctgacggccaccatgatcttctccagccggctggcgcaaatcgcctcgccaatcgcctgcttggagtcaaagaatttatagatataggctttggaaaagcctatcgctttggcgagatcggtgaccgtcgttttctcatagccatagcgactaaagtgcgccatggccgcgtcaagaatctggtcccgaacgctgtggtcatggggaccacggcttgcaggggtgggggtatttttcgtcatccgtttagcttaatgcgatcgctatcgtttgacaacgagtgacgttattatgatttggtcacaataacgccccgctctgtgatcctcttgccgcgttacgcctcacccgcctcttggtttatcgcgccggcgggcagacaacccaggccttgcagcgtctgatacaccgcgctgtcgagcggggtatgcggttccgcgcctaaaaaatcaaccagtttatcgttgcgcaggcgtaccggcagacgccagagatagtgcatctcgaccatttcgcgcagggtggcgttgaagggcgccgccagcttcaccagccaccagggaaaggacttcgctaccgccctgccgccatagcgggcgaccacccgctggatcgcctgactcatttcgctgccgtccgagtcccagtggccctgcatatgaaagcgagcaaacggctcaagctcatgcctgcgggccagcagcgcggcgatggtgtcggcgacgtcgggcagccaggcccactgatgcccgacgccgatcgtccccgggtagctaatgatgcggggaagctgaccaggcttgaccagcccctgcgaaaaccagttatttccggcgcgcgggccaaaaaaatcgcccgcccggacaatcaacgcccggccgccgcgctgcacgtaatcctccagcgccagctccatcgccacccggatggcgcctttgcgggtcaccggctgttgtgcggcctcttcagcaatcagcggaaaggcatccggtccatagttgtagaccgtgccgggcaggactacaagcgcccgctgccgttcggcggcctgcagggtgttgcgcagcataggcagtacctgttgccgccagtgccggtagcccggcggattcaccgcatggacgataacgtcgcaaccggcagccgccgccgcgacctggccgccatccagcgcgtcgccggctatccactgtatgccatcttcgggatcacgtatccgggcgccgcgcttcagcgcccgaacctgccagttgtctgccaccagccggcgcgccacttccccgccgatgcccccgcttgctcccagaataagtaccttgccgctgctgttcatcctctttccccgttcgctaatggatgcttgacagcctacctgtggctcatatcaaatgaaattgcataccatcgtcgagcggctatacatatttgtatgaatacctctattccctgggagtggtaccgaacctttctcgccgtcctgcaggaaggctctttatcgggcgcatcgcgtaccctgaacatcactcagccgacggcggggcgccatattgccgggctggaaaacgccctcggccaggccttatttacccgctcgcaaaccggcctgctggcgaccgacgcggcgctggcgctgcgggtgcacgccgaggcgatggacaataccgcccgggcgctggaacgcaccgcggctaacttcagtcgcgacagagccgagctgcgtggcgtggtgcgggtggccgccagcgaggtggtcggcgccgaggtgctgccgccgctggttgcccggctcaggcaggcgtgcccgaatatcgtcatcgaactgatgctctccaatcggtttcaggatctgcttcaccgggaggcggatattgcggtgcggatggtcgccccgcagcaggagcagcttatcgcccgccgtctcggcaggatcgagcttgggttacatgccaccgccgcctacctgacgcgccagggcctgcccgcgaccctcgacgatctggccagccacgcgctaattggttttgatagcgccacccctctcgtgcgccgggcgctgcaggcttacccccgttttcagcgcgaggcgttcgcgatgcggaccgatagcgacctcgcccagttgagcctgatccgcgccggagcggggatcggcatctgccaggcgcctcttgcggatggcattattcccctgcagcgagtgctggcggccgacttttctctgtatcttgatacctggctggtaatgcatgaggatctgcgccacagccctgcctgtaagcgggtatttgattttctcgcccaggggttgcaggcgtatattcgtggcccactggcgagctgacccgccccatcgcgcgggcatttcattgcctgcggaaatagtcactcattgacactgtaaatatggcattgtataaaaccccgccccaataatgagtttcatttgcattactcccatttgctggtcatccactcgcctgtttacaaggatagcgtttaatgaagaaggtcctttgcgcgttaggcttgatgttcaccgccgtcagttccgcgctggcaacaacctaccccctgacgattgaaaactgcggctatcaggagaccttcacccggccgccggagcgcgtggtcgcgctggggcaaaatacggtcgaaattctgctgctgctcgggctgcaaaagcaggtggtcgccagcgccttctggccgaccagcgttttaccgcagctggctgagcaaaacgcgaagattaaaaccttgacggtggaaattccgagcctggaatcggtgctggcgcaaaatcctgatttcgttcccgcccagttgccgctgctgctggggccggaaagcaaagtcgccaggcgtgaagatctcgctaccgtcggcgtaaacagctacgtctcaccggggatgtgcgccaccaaaaaggccaccggcgatatgtacggcagccggcaaaagctgtgggatatgacctggctgtatcaggaaattagcgatttttcccgcattttcaacgtcgaagatcgtggtcaggcgctgattgccgatttcaaaaaacgtgaagccgacctgcgccaggagtttggtaaaagcaaaaaggatctctccttcgtcttctggttctccagcgcctcaccttcggccgatgcctatgttggcggcaaaaacagcgcctccggatttatcgccagcgtgctgggcggacataatgcgattacctccgaaaccgagtggcccacggtgagctgggagagcattattgccgccaacccggatgtgatcgtggtcgccagcctggaccgtaaccgctgggcgctggataaggccgaggagaagatcaaattcctcaaaagcgatcccgccgtcagccagctggaggcggtgaaaaaaggccatatcgtggtcatggacggtcaggcgatgaatccgacaattcgcacactttacggcgcggaacaggtgggcgagcagctgagaaaaatggggctgaactgatgagcgtcgccgcgattgagacgcgccgcagcatgctgctcaccggctggtgtgtactggcagcgatcgtgctggcgctggtgatagcggtgggcgtcagcgtcggcgagctggccatcccgctgcagaatgtcttttacgctatcagcaacagaaccggcttaaccgctgagccgctcaaccgtatctatgagagcgttatctgggatttccgcctcagccgcgcgctggtcgccgcctgctgcggcgcaggcctcgctatctgcggcgtcgtgctgcaaagcctgctgaaaaatgccctcgcggaaccctacgtcctcggcgtctccgccggggcctccaccggcgcggtgtcgatcgtggtgctgggcattggcgctggcgcaatttccctctcggccggggcctttgccggggccttcgccgccttcgcctttgtcgccttgctgactaacggcgcgcgcggcggcaatgagcgtacgattcttgcgggcgttgccgcctcgcagttatttaacgccatcacggcctataccatcagcacctccgccagcgcgcagcaggcgcgcgatgtgatgttctggctgctgggcagcttcagcggcgttcgctggcccgaattccagctggtcattgtggtggtgctcgcgggtctggcggtctgcctgtggtatgcccgggcgctggacgcgttcaccttcggcgacgatgccgccgcctcgctggggattgctgtgccgcgcgtgcgcctgatcctcttcaccactgcggcgctgatcaccgccaccatcgtcagcatggccggctcaatcggctttgttggcctggtggtgccgcacgtgatgcgtttcttctttggcccgctacaccggacgttgctgatcgccagcgcgctggcaggggcgatattgatggtactggcggacattgcgtcgcgcctgctgattgccccgcagagtctgcccgttggggtggtaaccgccctggttggggtgcctttctttgccgtgattatctaccgctcaaggaataagtgatgagtatttgcgctgaaaatattacctggaaggcaggcaaaaaggtcatcgtcaataatgtctcgctgcgggtgtcgcgcggcgaaacggtcggactgctggggcccaacggctgcggcaaatcctcgctgctgcgcgttctggcgggcctgcgccgcccggatgcaggtcgcgtcaccctcgacggccaggacatcacccggatggcgaaaaagcagctcgcccgccgcgtggctttcgtcgagcaacacggcatgaccgaggccaatatgcgggtgcgcgacgtcgtgcgcctgggacgcattccccaccactctccgttctcaaactggagcgctcaggatgacgaggcgattgccgccgcgctgcagcgggtagcgatgctggagaaaagcgaacagggatggttaagcctctccggcggcgagcggcagcgggtgcatatcgcccgcgcgctggcgcagagcccgagcgaaatcctgctggatgagccgaccaaccatctggatatacaccatcagatgcagttaatgcagttgatcagcgagctgccggtaaccagcattgtggccattcacgatcttaaccatgccgcgatgttctgcgattcgctgatcgtgatgcagcaggggcagatcctcgccagcgggacgccggaggagattttgtccgaagcgctgctgtgggacgttttccgggtgaaaaccaaaatcgagatctccccttaccacggcaaaaagcacattcatttcatcgtttaggttgggcggatatgcctcttttctccctgcgccctgcggcaaccctctggcctccggtgttactgggaagccagttcgtttttaatattggcttttacgcggtcgttcctttcctcgccctcttcctgcgcgacgacatgctgctctcaggcggacttatcggcctgatcctcgggctgcgtaccttctcccaacagggcatgtttatcctcggcgggacgctggccgaccgctatggcgctaaggcgatcattctcgccggctgcgtcgttcgcgtcgccggttttctcctgctggcgtgcggggcgtcgctgtggcccattatcctcggcgcctgcctgaccggcgtcggcggcgccctgttctccccgtcgatagaggccctgctggcgcgggccggcaccctcagccaggccaacgggaaacgcagccgcgccgagtggtttgcgctgtttgcggtatgcggtgaactgggagcggtgatcggcccggtggccggaggcgtgctgagcgggatcggctttcggcatatcgccctcgccggcgcgggaatatttcttctggcgctggcggtgctctttttctgtctgcccgccgacgggcacacgacaacaacgcgcagacgagtcccatggtggacgcctttgcgccagccgcgctttgtcgcgtttattctcgcctacagctcatggctgttgagctacaaccaactgtacctcgccctgccggtggagatccaacgttccggcggccgcgagcaggatctggcgccgctctttatgctggcctcgctgttgattatcaccctccagctccctctcgcccgcttcgcccggcgaatgggcgccgtgcgcatcctgccgttgggctttctgctgctgtcggcttcctttgccagcgtggcgttattcgccgccgccccacccgccgaaggttggctgcggttaatgccggcggctggttttgtcacgctgctcaccctcggccagatgctgttagtgcccgcagccaaggatctgatcccgctgttcgccgaggagtcgacgctgggcgcccactacggagcgctcgccaccgcaggagggtgcgcggtgttagccgggaatttactgctcggtcatttgcttgaccaggcgctcattccctcgccgcaggcggtttatccctggcttctgctggcgctgtttccgctgtgcagcgccgtcgccctgcgggcaatctgtcgcccgctggcggcaacatgatgcagagcgggcaacagcccgatctggaagagaaccgacgataaagtacaccgcctgggaaagataacgggcgcgccccgccttactttgccgccagctcgcgacgaataatctcggcgccggcgctcagggcgtgcagtttgccggtcgcgacatggcgcggcagcggcgccataccgcagttggtggacgggtagagtttgtcggcatcgacgaacgccagcgccttgcgcagggttccagccacctcttccggggtttcgatagcatggctggcgacatcgatcgccccgaccatcacctttttaccgcggatcaactccagcagatccatcggcacgcgcgagttgtggcactcgagagagataatatcaagggacgatttctgcagctgcgggaaagcctcttcatactgtcgccactcggagcccagcgtctttttccagtcggtattggccttgatgccatagccgtagcagatatgcaccgctgtctcacacttcagcccttcggtggctcgttctaaggcggcgatcccccagtcgttgacctcatcgaagaagacgttaaaggccggctcatcgaactgaataatatcaacccccgcagcctctaactctttcgcttcctgattgaggattttggcaaattcccaggccagcttttcccggcttttatagtggttgtcatacagcgtgtcgatcatggtcatcgggcccggaagcgcccatttgatcggctgactggtgagctgccgcagatagcgagcgtcctccacgaagaccggtttctggcgctccacggcgcccaccaccgtcggaacactggcctcatagcggttacgaattttcacgatctcgcgtttggcaaaatcaaccccgctgaggtgctcgatgaaggtggtgacaaagtgctgccgcgtttgctcgccgtcgctgacaatatcgatcccggcccgcagctggtcgtcgagggataaccgcaaggcgtcgcgcttgccggccagtaattcttcgctggacagtttccagggcgaccacagggtctctggctgcgccagccaggaaggtttcggtaaactgccggcggtcgatgtcggaagccatgttttcatagtcattagccttttatatgggtttagcaaagcgcgaaattagcagaccattgctcaagcaacgtcttgtgcgggttgataaaatgttgttgtgtaaatttcccctgctcaatcgccaacaggctgcgctcttcccggtcatagacgatttttgttaatgaatgatccaggtggctgagattgggctgatagtattgccccgccggggagttggcattgtagatctccgggcgatatattttctgaaacgtctccatcgtgctgatggtggcgatcagttccaggctggtgtaatcgctgagcagatcgccggtaaaataaaaggccaacggcgcgacgctgttttttggcataaaatagcgtacctgcagacccattttgctgaaatagcgctcggtcagcgagacgccttcctgagcatattcaatgccgaggaccggatgttcgttaccggtgcgatggtaaacatctttactggagacgctcaggcaaatcaccggcgccttgctgaagttggcgcgccaggcgctggattgcacaaaatccttaaagatattgccgtgcaactcgccaaagttttccggtacgctgaagcgactctggtccttattatgttccagaagcagtacgctaaaatcgtaatcccgcacataggaggagaagttattgccgacgataccggcatgacgctccccgctctttttatcgacaatatgcgtttgcaggatctcaatcaccgggaagctggcgctatcctgagcaatattcatctcgacagaaataatatccagttccaccgcatagcgatcgttatggggattatcccagtgggccaggctattaaaacggttattcatcatgattaacgtattgcgcagattttcctcacggttcacccctctggctaaattagcgaagttggtggtaatacgcgtattttccgcagggttatagttttcatcaaaccgggtgcgcttaatcgtataggtaaatttattattcatggcgattgtccatcctgatggcgggcataaagcgaacccggcggaatactctccaccagcctggcgacgcggagtcaggccgggcgcgcttcaaccggtaaatgttgttgattcgttaatgaacctatttttgccagagtcagcgctggagggaaagcgacttaaattcaatgcaacatgagccatcctcatgttgctccaggcggtggccgatggccgacgcaggccgacaatattagtcaataaacgtttgttcaatggaagtaggcagggtacactctttaaccactataagatgggcttacctgcccgccgtacccgtttagctggagcttttgtcgtacagaatgattgttgatatcagtattatgtcgatgtgcatggccgtactgctgattatgagcgtactgctgaattaagaggctcccgaacgcaatgacactcgctctcatctgacctccacattcgcgaggaaaaaagaagattcagaggattcgcgccgcctgggattgttccgcctgccggcaccctctactcttttgggacttgcttattgaggaatcccggatgaaaaaagctctgcttgccctgttcgctatcgccaccgttaccgccgccagcgcctttgcggctgataaaaccgacgtcccggcgcctgtcatcgataacggagtccgcccgccgatggagagggatcgtggccccctgccgccgttcccgccgcagcttccgccgcacagaccggtgctgttttcagccacggtagcaaccgatacgccagcggaaaccattaacaaactgaccgcgctgatccccgccggccaggcgaaacactacgaagtgcacgttgaggtggtgccggttggcgagggaaccgacagacaatagcccaaaggagatctacgctgtcatctgtcagcaataaaaaagctgccgcatatcgcggcagcttttatgtatttatttacagctgagcagctgaaaattagctacgcactttccggtagataaacagtaccaccagcgcaccgataaccgctaccacgaagctgccgaaattaaacccatcgaccttgccaaaaccaaacagggtactgatccagccgccgaccacggcgccgatgatccccaaaataacggtcacgataaatccgccgccatcttttcccggcataatccacttggctaaaataccggcaataagtccaaaaatgatccaggaaagaatacccatggttaaccgtcctcttgttacctttaagcatttagtattgaaaagagtagcataaataacgagagtggatcggtaataatataaatattagataattccctgccgacgcgcggctgatcttgtgacaacctctctggctctggcaggccggctctcgcttattaccttaaaaaaagggaggctattcgcctcccgccatgcggcttatattaccgcggtggttagtcgtgatgaacaacataaccgcgactgttcgtcgaagatttcaatttgccagacctgatggcgcgtcccgacgtgcagcgctttgcagacgccgcgcacccggcccccgcgcgccgaacggatgtggttggcgttaacctccagccccaccaccttttgttcgccttcgctgcacagatagcctgccaccgaccccagggtctccgccagcaccaccgacgctccgccgtgcagcaggccaaacggctgctgtgtgcggctatcgaccggcatagtggcctccagcgtatcgtcggtaacggtctcaaagcgaatatcgagcagccctaccatgttcccctcaccgagccggttgagctgctccagcgtggcctgacgtttccaaatcatccgattatctccagtaacgcctgcagcgggtggcgaacgccgctgccttcaatacgcttcacctgactgcggcaggagtagcccgtcaccagacagcggtttcgcggcagccgctgcatcgcctgctgccaggagagcgcgtaaatggccaacgagtttgcgtggtttttcacttcatgaccataggtgccagccatcccgcaacacccaacgctgacgttttccagcttcgcgccgaagtgggcaaaaatatctgcccactgctttgtcgccgccggtagcgcggtcacttcggtacagtgaccgaacaggtaccagggctcaccgcccagatcgggacgggcgtcgctggttagggccttcggcaaccactcatggactaacagcacctggaaatcgccgcgcttgtcgccgagcgtctgcttgtactcatcgcggtagcagagcaccagcgccggatcgacgcccaccagcggcatgcccagctgcgccacgcggttgaggaagtccgccgtcttctgcgcggtgcgcgcgaagcgggtgaggaagcctttgatatgctgcgccttgccgttcggcgagaacggcaggagcaccggctgatagcctaaggcctcgaccagacggataaagtcggccaccacctgggcgtcgtagtagctggtgaagggatcctgcaccaccagcaccatcttcgctttctgctcggcgctcagcgcttcgagctgctcaagggtcatattggcggaacggtggccggccatctgctgcttcagcgacggcgccgagagcagcggcagatcgaccatcccgatatgcttctccgacagctttttcagccacggctggttaataaaaaagttaaaggtcttcggcgcctgcgccatcagcggcgcataagattcgaccgaggccaccagatgatcgcgcaccggccgcagatagcggctgtggtacagctgcaggaagcgcgagcggaactcgggaacatcgattttgatcgggcactgggtcgaacaggctttacaggccagacagccggacatcgcctctttgacctcatgcgagaagtcatactcgcctttgcgcgcatgccagctgttgcgcgtgcgcgccaccagcgagcgcaggctgacgccctgctccggcagcgccttctccagctggttgggatcgacgccgcggtcggccagcaggcgcagccattcccgcaccagcgtcgcccgccctttcggcgagtggatgcgctggttgctgactttcatcgacggacacatcggactcttgacgtcaaagttgaagcacagcccgttgccattacactccatcgccccacgccagctgctgcgcaccgcgatggggatctgccgatcccaggtgccgcgcttcgccgcatcgactttcatcatcggcgcgtcgataccttccggaggacagattttccccggattcaggcggttatcgggatcgaagaccgctttgatcttgcgcagctcggcatacagcgtctcgccaaagaaggccgggctgtactccgcgcggaaccctttgccatgttcgccccacagcaggccgccatacttcgccgtcagcgctaccacctcgtcggagatctgcttcatcagcacctcctgctgcggatcgcacatgtccagcgccgggcgcacgtgcagcaccccggcatcaacgtggccaaacatgccgtagctcaggccgtggctgtcgagcagcgcgcggaactcgacgatgtaatccgccagatgttcgggcggtacgcaggtgtcctcggcgaaaggaataggcttggcggcgcctttggcattgcccaacaggccgacggccttcttgcgcatggcatagatgcgctccacgccttcaagatcgtgacagacctgccagccaatgacgcccgcctcgctgccggccatcagctcgtccagccgctggcacagggtagtaacctgctggtcaatcagcgccgcgtcatcgccggcgaattcgacgatattgagcccgagcatctctttatccggtacgtcggtgatcagttcgcttaccgagtgccagacgatatcctcgcgcgccagattgagaactttagaatcgacggtctccaccgacagggctttcgcttcgaccataaagggcgcattgcgcagcgcagagtcgaaggagtcatatttgacgttgaccagacggcgcaccttcggcaggcgggtgatatccagccgcgcttcggtaataaacgccagcgtcccttccgaaccggttaaaatacgggtcaggtcgaactcgctcatctcatcgttaaagacgtgacgcagatcgtatccggtgaggaagcggttgagtttgggaaacttatcaatgatcaggtcacgctgcgccttgcagcgctggtagaccgtgttgtagatccggccaaccgtcgagggggtattgcccagcgtctccgccagcgccaccggcaccgcctgggtatcgaggatatccccgcccatcagcaccgcccgcaggccgagcacgtgatccgacgttttgccgtacaccagcgatccctggccggacgcgtcggtgttaatcatcccccccagcgtggcgcggttgctggtggatagctcaggcgcaaaaaagtaaccatagggtttaagaaactggttcagctgatctttgatgaccccggcttcaacgcgcacccagccctcttcggggttaatctcgatgatgcgattcatatagcgggacatatcaacgataatcccgccgttcagcgcctggccgttagtgccggtgccgccgccacgcggggtgaaaatcagcgatttaaaacgcggttcggcggcaacgcgcgccagcagcgccacgtccgccgtggatcgtggaaaaatgaccgcatccggcagcagctgatagacgctgttgtcggtggccatcgttagcctgtcggcatagctggtggcggtatcgccggtaaaaccctgttgctccagtacctgcaaaaaattcagcaccagttgaactacccctggcgcctgagaaatttgtgggatcatcacgcttgaccctgcctgactatgttgtgtttgaaaatattgtgttggtgctaactaaacgtttgcgtagcgcattcaactttttatcacatttttttcatatgcgcccacgtgttttctgtgcaaaatcagcccggcaaaattattgatattattatcagtatatggatttacgcggcgccagctgtttggcgcgactggaaaggtaaaatttctctatgattaatccccatcagcctcgggacattccgcaaatactgctgtcggtgctgttcctggccctgattatcatatcctgcctgtgggttgtgcagccgtttattctgtccttcgcctgggccggtacggtggtgatcgccacctggccggtgctgctgcgtctgcagcgtgtgctgttcggcaaacgactgctggcggtgctggcgatgaccctgttgctgtttctgctattcgttattcctatcgctctgctggtcaacagcctggtggataacagcgttccgctgatcaaactcatcagcagcggaaatgtgacgctgccggatttcgcctggctcaacagcgtaccgctggtcggcgataaactgtactccgcctggcacggtctgctggatatgggcggctcggcgattatggccaaggttcgtccctatattggcaccaccaccagctggtttgtcggtcaggcggcgcacatcggcaagctgctggtctactgcggtttgatgctgctgttcagcgcgctgctctactggcgcggcgagcaggtggcctatggtttccgctacttcgccacgcgcctcgcggccaaacgcggcgacgccgcggtgctgctggccggccaggccgtgcgcgccgtggcgctgggcgtggtggtcactgccctcactcaggcggtactgggcgggattggccttgccgtctccggcgtgccctacgccgctctgctgaccgtggtgatgatctttacctgtctggttcagctcggccctttactggttttggtgccgtcgattatctggctttactggagcggggacaccacctggggcaccgtgctgctggtctggagctgcgtagtcggcaccatggacaacgttattcgtccggtgctcatccgcatgggcgccgacctgccaatgatccttatcctcaccggcgtcattggcggcctgatcgccttcggcatgatcggcctgtttatcggtccggtgctgctcgccgtctcctggcgactgtatgacgcctgggtgcatgaggtgccgccgccgccgaaagaccctgacgtcgtccttgaagagctcagtgagctggaggccggtcgcaagtaatgcctggcaggcggggagacccgcctgtttctttgcccgcatattgttaagcaaaatttattgatcgccggcaatgcgctggccccgcgcgcccttcacctcgctttcctcccccggtccttcacaacaatttaactattgagaggaatctgatcgacggcaaaggccccgctgcctactattagctcacggttataaatcaacaccttgatttataagcatggaaatcccctgagtgaaacaacgaattgctgtgtgtagtctttgcccatctcccacgatgggcttttttttgccctgcacatcacgacaccagatagcctgacaccggtaaaaaaaatccccggcatcgctgccggggatcggtcctgtcagggcgaacttattttttcagttccgccagacctaaccaggtttgtaccacggtatccgggttcagggacaagctatcaatcccctcttccatcagccaggcggcgaaatcctcatggtcagacggcccctggccgcagatgccgacgtatttaccctgtttcttcgccgcgcggatggccatcgacagcagggctttcaccgcgtcgttgcgttcatcaaacagctcagaaaccacaccggaatcgcggtccagaccgagcgccagctgggtcatgtcgttcgaaccgatggagaagccgtcgaagtactcgaggaactgctccgccagcaaggcgttcgatgggatctcgcacatcataatgatcttcagcccgttctcgccgcgcttcagcccctgacgctccagctcttcgaccaccgctttcgcctgggcgacggtacggacgaacgggaccatcacttcaacgttggtcagtcccatgtcgttacgcacgcgcttcatcgcttcgcattcaagggcgaaacagtcgcggaagctttcggaaacgtagcgtccggcgccgcggaagccgagcatcgggttctcttcttccggctcatagcgctcgccgcccaccaggttggcgtattcgttcgatttgaagtccgacagacgcacgatgacccgtttcggatagaaagcggcgccgagggtggcgatcccttcggtcaggcggccaacgtagaactctctcggcgaatcgtagcctttcatcagctcgcggatttcgttctgcaggcccggctcctggtcgtcaaactccagcagcgcgcgcggatgaacgccaatcatacggttgatgataaattccagccgcgccagaccgacgccttcgttcggcaggcaggcgaagtcgaacgcgcgatccgggttgccgacgttcatcatcaccttcagcggcagatccggcatgtcgccgacgctggagctcttgacgctgaagtcgagcagctcggcgtagacatagccggtgtcgccttcggcgcaggagacggtgacattctgattttcctgaatgcgatcggtagcatcgccgcagccgaccaccgccgggatccccaactcacgggcgataatcgccgcgtgacaggtacgcccgccgcggttggtgacaatcgccgaggcttttttcatgatcggttcccagtccgggtcggtcatatcggtaaccagtacgtcgcctggctcaatgcgattcatctcgctgatatcgtggatcaccttgaccggaccggcgccaatgcggtggccgatggcgcgcccttcggcgatgatctgcccctgagcgtggagggtataacgctccatcacctggccgcgggaacgcacggtttcaggacgcgcctggacgataaatagcttaccggtgtggccatctttcgcccactcgatatccatcggacggctatagtgcttctcgatctgcaccgcctgcttcgccagctcctgcacttcctcgttgcttaacgagaaaatatcgcgctgcgcctgcggcacatcttcgatacgcacctgtttaccgtgctcctgggtcggcgcgtaaaccatacggatctttttcgaccccatggtgcggcgcacgatcgccggacggccagcggccagcgtcggtttgtggacgtagaattcgtccgggttcaccgcgccctgcaccaccatctcgcccaaaccccacgccgaggtgataaacaccacctggtcaaagccggattcggtatcgatggagaacatgacgccggaggaggccagatcggagcggaccatcctctgcaccccggcggagagcgccacgccgcggtgatcgtaaccctgatgcacgcgataggagattgcgcgatcgttaaacagcgaagcaaacacgtgcttcacggcaacgagcacggcgtcaaagccctgcacgttgaggaatgtctcttgctgtccggcgaaggaggcgtccggcatatcttccgcggtggcggaagagcgcacggcgaatgaggcctcggcgtcatcggcggacagcaggtcataagcatcgcgaatcgcgttttccagttcgctctggaagggggtatcgatgatccactgtcggatctgcgcgcccgctttcgctaatgcggaaacgtcgtcaatgtcggtttcatccagcagcgcatagatgcgctggttaacaccgctttggtccaggaactgattgaaagcatcagcggtggtggcaaacccgttaggtacggaaacacccataccggacagattcgtaatcatttcaccaagggaggcatttttgcccccaactctgtctacatcattcatgccgagttggttataccaaagcaccagcggtgacgagccattgttggacatcgagacaatccttttgtgatttaataccagtgaaaaaaatttcacgatcgactgcaggattatcctgacatatttatgaagctgaaaaaaacggtgaatcgttcaagcaaattattttttcatttttcggactgttcccccgatattgctaacttgatgatttttaggaattctgatgaaaaacgctggaaataacggcgacaaaaagaaaatgaaccacccttttcataaaaaacaaaaatagcgtttcaattttaacaagagacaaatcaaacagggatatgcttaaatttaatatccgctttcaggcaattaaactcattataccggatggtcaaaatggaaagtgctgtagatcgccacgtattttatatttctgacggtaccgccattacggcggaggtgctggggcatgccgtgatgtcgcaattcccggtcgccatcagcagcgtaaccctgccgtttgtggaaaacatcagccgcgcgcgggcggtgaaggagcagatcgacgccatctgtcagcaaacgggtattcgcccgctggtgttctactccatcgtcatcccggaaatacgcgacattattctgcaaagtgaaggcttttgtcaggatatcgtgcaggcgctggtggccccgctgcagcaggagctcaacctcgacccgacgccggtggcccaccgcacccacggcctcaaccccggcaatctgattaaatacgatgcgcgtatcgccgccatcgattataccctcgcccatgacgatggcatctcgctgcgcaaccttgaccaggcgcaggtgatcctcctcggcgtctcgcgctgcggcaaaacacccaccagtctgtatctcgccatgcagtacggtattcgcgccgccaactatccgtttatcgccgacgatatggacaatctggtgctgccggcctcgctgaaacccctgcagcataagatgttcggcctgaccatcaatccggagcgtctggcggcgatccgcgaggagcgccgggagaacagccgctacgcctccctgcgccagtgtcggatggaagtgaccgaagtggaggccctgtatcgcaagaataaaatcccctgcctgaacagcaccaactattccgttgaggaaatagcgacaaaaatcatggacatcatggggctgaatcgtagaatgtactaatacactagtacattattaaaaatttgtttatgctatcacccgtggcctatacaggatcatgccctgctcttgcaataagcagggattggtttatcgtgatgcgcatcacttcccggcattttcgccgcggaagaaacagatttttgagaccccaatgaataaaacagacgaattgcgtaccgcgcgcattgagagcctggtaacgcccgcggagctggcccagcgccatcccgtgacggccgacgtggctgcccacgtctcggcctcccgccgccgaattgaaaaaatcctcaacggcgaagaccgccgactgctggtgattatcggcccctgctccattcacgacaccgacgcggcgctggagtatgcccgccgcctgcagggcatgcgcgagcgctaccagccgcagctggagatcgtgatgcgcacctactttgaaaaaccgcgtaccgtggtgggctggaaaggcttaatctccgatcccgacctcaacggcagctaccgggtcaaccacggaattgagctggcgcggcgcctgctgctgcaggttaatgagctgggagtaccgacggccaccgagtttctcgatatggtgaccggtcagtttatcgccgatctcatcagctggggggccatcggggcgcgcaccactgaaagccagatccaccgtgaaatggcctcagcgctctcctgcccggttggatttaaaaacggcaccgacggcaatacgcgcatcgcggtggacgccatccgcgcctcccgcgccagccatatgttcctctccccggacaagcaggggcagatgacgatttaccagaccagcggcaacccgtacgggcatatcattatgcgcggcggcaaacggccaaactatcacgccgaggatatcgccgccgccggcgaggcgctacgtgaattcgatctgccggaacagctggtcgttgatttcagccatggcaactgccagaagcagcaccgccgtcagctggaggtgtgcgccgatatctgtcagcaaattcgcgcgggctccaccgccatcgccgggattatggccgaaagcttcctgcaggaaggcactcagaaagtggtccccggacagccgttgacctggggccagtcgatcaccgacccctgcctgagctgggaagacagcgaaagattattgagcgagctggctgcggccaccgccacccgcctgtaactgctccgcccgccgcgcctgcggcgggcaattctcttcgctgactcccctaccaaatccggtaacacgataaataacgcttgccgtcaaaaacaacattattgataatgattatcattgttgccttgatttttattctgagagctatgacgcgtatggataacactgccacagctgaaaaaccaaaagacaatgccccttatcccgtggcgacggacagagagatcagcagtcgggttctgttaggcagcgaaggacgagtagtgattgagcatggcggccagcgctatctgctgcgccagacccacgccgggaagttaattctgaccaagtaaacgccccgctgaacgcggggcgaggcaagttagctcgagcagctgacttccagacgtttcccccagtccggcgggcggcggacgtagtcgtcctcgcgatcggtaaaggggtctgccagcgcggcatgcaggcgctccagctcgcccatatcgcccgcctcagcctgctcgatcgcccgctgcgccagccagttacgtaacaccagcgccggattcacgccctgcatcctctgctggcgctgcgcgtcgtccacctgttcatcacgcagccgcgcacgatacccggcaaaccagctgtcaaaggccgcgcggtcgataaactcatcgcgcagcggcgatgcggcgctgagctgttcgctgtggctcagcaggcggaacgtccgggtatagtcgctcttctcgcggatcatcagggcaaacagcccgtccagcaggtcgttatcccctttctgctggctgaacaggccgagtttatcgcgcatccgctggccataagcggtcagcaaggcgtgctgatactcatccagcgccgcgtttaacgcttcagcgctgataaacggcgacagcgattgggcgagacgctgcagattccacagccccaccgccggctggttttcaaaactgtagcgcccctgataatcggagtggttgcagatgaagtccggttgaaaatcgtcaaggaagccatacgggccgtagtcgatggtcagaccgagaatcgacatgttgtcggtattcatcaccccatgggcaaagcccacggtttgccagctggcgatagtctgcgcggtacgcatgacaatgtcacggaaccataacaggtacttatccgcctcatcctgcagctgcggccagtggtggcgaataacatagtcggccagttgctggaccttctgcggctcacggcgatagtaaaaatgttcgaaatggccgaagcggacatggctctcggccacccgcatcagcatcgcgccgggctccacgcgctcgcggtagaccggggtatcgctggtcaccatcgccagggcgcgcgtcgtcgggatccccagagcgtgcatcgcctccgacgccagactttcccggatcgtcgagcgcagcacggcgcggccgtcccccatccgcgaataaggagtcaggccggcgcctttcagatgccagtcgtaacggcggccatccgccagctgctgctcgccgagcaggatcccgcgtccgtcgcccagctggccggcccaggcgccaaactgatggccgctgtatacctgcgccagcggcgacatgcccggaagcagcgcttcgccgccccagacaccggccccgctttcaggcgcaaacagggcgtcgggcacccccagctgttgcgccagcggggcgttgcgccagatgagtcgggcgttatccaacggcgttggtgacagggaagtgtaaaagtccggcagttcatcccgccagtgggtggtaaaagaaagggtcatggttcctcctctctccagtgtagtgcctggaacagcggattaacacgggcggagtgcagggttatcggcataaaaaagggaagcgttcgcttccctcttgcttctgaatgacgtcagattcgccgcgcctgccagaactttttgttccagtagacgttatccagcgaggaacgggtgacgccctggctggtggaggcgtgaataaactggttgtcggtatcgtagatgccaacgtgcaggccgctctcccctgagccggttttgaagaacaccagatcgccgggcagcagatcgcgcttatcgatgcgggtgccgatttccgcctgctcgcgggtttcacgcggcagctggagggcaaatttatcgcgaaacgtgcgcaccacgaagccggagcagtcaacgccgcgcggcgtcatgccgccgtagcgatacggcgcgccgcgccagctgcgcagctgctcgttcagattcgccaccaccgtgatggagtcagccagccgaggattcggcggcggtgcccgatggctgctgcagccggctaaaattaacgccgccgccaacatgaaccagaagcgcatttcagatgatccctctgtccctagtctctatcgcaataatttagcttgtttatcaatatagtgacaagataactgcgtgctactgtgacgcgatgagcataatatgaccggccacctcaacgcgctggaacgggatcgcataggcggcggttaaattttcctcattcagcacctcggcggtctccccgcaggcgatggcttccccctggcagagcagccagctctgaccggcgtggcgcagggtatggttgagatcgtggctgctcatcaccaccgcaatccccgccgcgctcagctcgtgtaacagccgatccagcgccgcctgctgggccacatccagactgttcatcggctcatccagcagcagcagctgacccgcggaattattcaagggatcgatctgcaggatcactgccgccagccgcacgcgctgccactcgccgcccgacagctgattgaccggacggcccagcttattgtccagaccaagcctggccgcgatatcgctcagacgggcgctatcacccagctgctgcatatgcagcgccaggtagtgccataccggcatggcgaacggcggggtctggtgttgacacagatatccgcgacggcgcgccagctccctcgccggccactcgtcaagcagccggccgttaaaatgaaccgtgccggggccgtcggacagccccgccatgcgggtcagcagcgtgctcttccctgcgccgttcggccccaccagatggacaatctccccggcgcgaaaggccgcagaaaacggggccaggcgccccgccgcttctacatcctgtagctgcatcagaaacgacattattgcgccagcgctcctttaatcgccgccaccagctgcggatcgtccggcgtcatatccggcgagaagcgctgaatgacgttgccctggcgattgatgaggaatttttcgaagttccacagaatgtcgtccacatacagcggcgcccggcctttgctggccatccgctcataaaaaccgctgccttccggggccaccgctttcggcgcggcggcaatcagtttttgatagagcggcgcgcgatgttcgccgttgacgtcaattttgctaaacagcgggaaggtgacgccgtaggtggtgctgcagaaggtcttaatctcctcttcactgcccggctcctggccgaggaactggttgcaggggaaccccagcacgctgaagccctcggcggcaaactgcttttgcagatcctcgagttgctcatactgcggcgtcaggccgcatttcgaggccacattgacgatcagcagcaccttgccggcaaaggatgccagggtggttttctcgccatcaatggtcgtcacttcggtattcagaatgtcatgttgcatagcctgtcctcaatggataaaccggtttccggtgaaggtgatccctttctactgtagcggattcagcgcccgccattctactgccattacccccgagttgtcgcatgatgtaacagcgcttcgctggccgccggcaacatgaaatcctctcaattgggccgtcgaccatttccgtgtacagtgttccatgaatgtaatatggtttcgttacttgttaatttaagagagttttagtgatgaagaagttgtttagcctggcgttaatcgccacctctgtcgccctgctgagcgcctgctccccggatgaagataataaagtaaaagtcgctatcaataccgggccggacgaagccatctggaaagtggtggagcaggtggcgaaggataaataccacctcgacgtcgaagtggtctccttcaatgattatgtgctgcccaacgaagcgctgaacaacaaagatgtcgatgccaacgccttccagaccctgccgtaccttgaggcgcagtcgaaagaacgcggctataaatttgcggtggtcggtaaaacctttgtcttccctatcgccgcctattctcaccggatcaaaaatatcagcgaactgcccgaaggggcgacggtgaccatctctaatgaaaccaccaccctgggccgcagcctgctgctgcttcaggcgcaggggttactcaagctgaaaccgggcgtcggctatttacccaccacgctggatatcatcgacaatccgaaacagctgaaaattgttgaagtggataccccgcagctgacccgtacccttgacgatccgaacgtcagcctgtcaatcattaacaccaacttctccgcccaggcgggcctgtcggccgcccgcgacggtctgtttatggaggggccggattccccatacgtgaatgcgatagtcgcccgcgaggataataaggacagcaagaaaattcaggaattaaaagccgccttccagaccagcgaagtcgcggaaaaagcgaaggaagtctacaaaggcgacgcgatcaaaggctggtaagcctgaaccggcgccgtccctgccgacggcgccgcgctacccccgcccccgcgaacgcagcagcaaccagataaagaccggcgcgcccagggtcgccgtcaccacgccaatcggcagctctgcggcggaaagcgccagccgggcaatgatatccgcccccagcaaggcgcttgccccggccatcatacaggccgggagcaacacccggtgatcgctcaagccgcatagccgcagaatatgcgggatcaccagaccgataaagccaatcgcccccgccagcgccacgctaacgccgaccatccagccggtcgccaccaccagtaatttgcgccacagccacagcggcagcccaagctgacgagcggagacttcgcccagcgccagtaaattcaggggttgcgactgcagacagacccagcagagcaccggcaggagggctatcatcagccacagctgttgccagtcgacgccgccaaacccgcccatcatccagtacattagctgacgcaggtcaaaagaggtggagaagtagactgcccaggtcatcagggcgctgcagatgatccccagcgccacccccgccagcagcagacggctggtagacagatggcggcgggcaaaacgcagcagaataaaagtgatcagcagcgcgccaaagatggcacacaggccgagcgcccagccgggcaagactcctttgcccagcaggacggcggcaatcagcccgacgcccgcgccgttggagatccccagcagacccggctccgccagcggattttcaaacagcgcctgcattatcgccccggagagcgccagcgccgcccccaccagcagcaccgccagggttcgcggcaggcggatctgccagataaacagctggcctttggcgctgagccactcgccgggcgggatccattgctcccccgcgcacaggctgatcagcagggtgaccagcagcaacagcgttaatccgaagagccaacgccggctgcggcgctgttgaagatgggcgagagtcagcatagattccattacgcagggggaacaagaggctgattttacggtggctgtcgcggtgagaaaaggaaaacctcacgaccaaacgtcgacgcgaaggaaaatctcctccgcgtctgcggtcgttcgtcacaccagaatctgaaacagcagcgcaaagagaatgatattcgccaccacgattgcccagccgttatagagcatatatttcagatgagtagactgcgccagccccatctggccgaacatatctgatgagggaaacggcccgaaccagtccacctgggatgaggccagcagcacggcggtggtcccctggggcggcacgccggcggccatcagcatcgggccaaagattttatgagtaaaggtcatctgggccaccgccgcaccgggcacatggccgataatattgaacgcgaagatgctaaagcacagccaggccggggagatcccctccagcagcggttgagtatactccagcagcccctgataggcgtgcaggccatccatcagctcaaggatcgggttgtacagccagtagagaataaacatccacaccaggcggccgcagccgtgatacagggcctgaaggatctgcgtcggtcgcaggccgcctaccaggccggtcatcagggccaccagcagcatcacgattatcgcgaagctgaagccggctttaatcaccacgccaacgatcgccatcacgatgatggtcgccgcgaaggccagcgcgcttaatttacgccgacgctgctgcgcggcgctgagatcctcttgcggcttttccgcgagatcgacgtcatagcgcagtttgccttcggtcatcttctggatccgtcccgccattacccagccggccagcagcgtgaccgcgctcatcggcagaccaacgtacagcagataatccgggtagctcaacccaccgaggctgaggatcgtcacggtactgggggtgaaaggcccggtaaacagcccaacggaaccggcggtcatcatcagcgcggcgaccgttggcggggttaagcgtaccgctgccgccaccggaatgattactgccacgataatggcattgccaccggccatagtgcccagcgaaccgcaaattaaaatcgatgacgccacaatgccgaatttcacccgcgtctgactcgacaacccgatgcgatggacgacaaattttaccagctcaaccgctgcgccggtgcgggtggccacttcccccacgccggcgccgagcataatgataagcccaacggtggcaataaatgacccggtggatttcgccagcatcgtgcccatttccggcaggccggtcgaggtcattatcatggcgataataatcgaggagatgaccgccagcacaatatcaacgccgatcagcgataatatcgctagcgccaccagcggcgtaaattccagcagaccaagctcgctgcctggtcgaccgtggcaccacagcgcgatcaacacgaacagcagcaataacagaccaataataacgtttttccgcgtgatatttcgtctgacaggcgcattgcctgtgagcgttgagtcactcataacactccttaatgccaatcaatccgaccatgatggtcaggtggtgtatgggggcctgctcagaaaatatcctccctctttttcattattgattggccgcggcctgagggtttgtttgggtacaaaggaaacgattctgagagcgtaatatgccgccattgggcggggtctacagcacaagatgtaaccaatgcgctgattggtgattaaatctatgttaacttagtgttagtagaaaatgactttttatcggtaggctataaccctgagttaactgttcatgaaactgcgtcatctggaaatcttctatgccgtcatgacctgcggctctttatcgcgagcggcggaagcgctcaatatctcccagcccgcggccagcaaagcgttaaaaagcgccgaaatgaagctgggttttaccctgtttcagcgggtgcgcggcaagctgctgccgaccagcgaggcgatcacacttttcgaaaaagcgcagagcatttatcaggacctggacaacctgcgcctgctggccgacaacctggctcgcgatccgcgcgccaagatcactttaggctgtctgccaagcctggggttaagcctggtgccggagctggtgaccgacttttatcagcaaaacagcaacctggtgatgacgctcactaccgagcacaccgagacgctggtcaaaaaactggatttgcgcgagatagatttggcgctgacgctacagccggtgcagcagggagagatcctgaccaccctgattgccgaagtaccgctggtgtacatcgaccgtcattatcgtcagggggcggtggagatcgaccagatcgaccagcagcgctggatctcgccgggaccgcactcgctctctgccgccatcgccacccgtcgcgacttttccaccacccggctaaacgtccagacctactatatggccaccgagttcgtgaagcgcggcatgggctgcagcatcactgatatcttttccgcccagcacaacctggccccggagatgatccatcccattacgccgccgatggcgattaacctctgtctgttacgccgggccgacgtttccctgagcccgatggcgcaaaagttcgtcgattttctctgccagcgtctgcgccagcagctcaaggagattaacctgcggttataccctgaccataaaaagtcaattgcgccgctggggtaaatgctttgacataacccgataaatttatcagcggtggatatatcgggttatgaacaaacgcattgtcattatcggcggcggcgtggtcggtctggccacggcctgggaactgatcaagcgcggccatcaggtgcaattactggagcgcaatgccgaaccgggcagcgccaccagttttgccaacggcggacaattaagttaccgctacgtcgccccccttgccgacagcggcgttcctctgcagggaatgaaatggatgggcaaagccgattcgccgctgaatatgcgtctcaggatgtctctccagcagtggcgctggctgctgcagtttctgcgcgcctgtaataaccagaccaataaaatgaatggcgaccatattttacgcctgtcgctgctcagccgtcaggtcatgcaggcgtggcgggatgaggataatcttgccgatttccactggcggcgcagcggaaaattaattatccatcgtcgcgaatatgattttaataaagcagcaaaagggattgatcctcagtatcagcaggcgctgaatgctgaagcctgcctgcagctggagccggcgctcaaacatattagtccttctctgcagggcggaatctattcgccaggcgatgaaacggcagattgtcatcagttctgccttgccctgctcgacaagctcaatgccagcagcgactttagcctgctgacccagtgtgaggtgcggcgactccataagcgcgggggacgcatcagcagcctggagaccagtcaggggaccctcaccggcgatgagtatgtcgtcgccgccggtaacggcagtggttctctgcttgggcatctgggggttcgcgtgccgctgtgcgccctgaaggggtacagcctgaccctgccctatcctgaaaaagcaggtattgcccctgacatcagcgtcaccgactacgggcacaaaatcgtttatgcccgccttggccaacagctgcgcatcgcggcgatggtggacatcggctacgacggcgacgaactgcgcgaatgccgcattcaggcgctgaagaacatcgtcgcccgcagctttcctgaactggaggggctggacgaggccgaagtctggaccggcatgcgcccgtcaacgccagccggcccgccgatgctggggcgtgccggctaccccaacctgtggatgaacctcggccagggtagcctcggctttactctcgccgccggcagcgcggtggtgctgggcgcgttaatcgacaatcagatgccagacatttctttagaaggtctcacatggaaacaaaccgcatgacaattattcgtaataatccacaacctcgtcttgccgccagcgttgcgtatggcgatctgctgttcctctccgggcagacgccaaaaagcaatgaagacgatatcgttttacaaacccgtgaagtactggagaagatcgacgcgctgctggccgcggccgggagcgataagcagcacgttctctccgcgcagatctggttgaaaaatatcgagcgtgactttgccgcattcaatgaggtgtgggtgcaatggatgccggaaggctatagcccagcgcgagcggccgtgcaggcggagatggcgcgaccagaaatcctggtggagatcatgctcaccgccgtcaaagcgtaaagattaacagaaaagaaaaaggccgcaatgcggcctttttaattagttcagattatttgtctttcggcgacgcgttttcgacacggcttttcagcttctgaccgggtctgaaggtcaccacgcgccgggctgtaatgggaatatcctcccccgtcttcgggttacgtcccgggcgttggtttttatcccgcaaatcgaagttgccgaacccggagagtttgacctgttctccgttttccagagcacgacggatctcttcgaaaaacaactcgaccagttctttggcatcccgcttgctaagcccaagcttatcaaacagatattctgacatttcagcttttgtaagcgccataggttcaatccctcaatgatgcctggaatcgctcttttaatgcctctacacatctggcaacggtagcggcaatctcctcttcttcgagtgtacggctggtatcctgcaggatcaggctaatcgcaaggctcttatacccttccgccacacccttaccacggtacacgtcaaataagtttacgccaactacctgatttacgccaactttcttacattcggctaaaacatcggcggcagccacgttttccgcgaccagcaccgcgatgtcgcgacggttcgccgggaagcgggaaatatcgcgcgcctgaggcaccacgcggtctgcgagcttgttccactccagttcgaacaccagagtgcgaccgttcagatccagtttacgttccagctcaggatgaacaaccccaatgaaaccaatgcgttcacctttaagataaatcgctgcggattgtcccggatgcagcgcggtggtcgcttcagcacggaattcgatatccgctaattttccggttaaatccagaacggcttccagatcgcctttcagatcatagaaatcgaccgtctctttcgccagtgtccagtgctcttcgtagcggttgccgcagatcgccccggccagcatcacatcctgacgaatgcccagcggcgcattggtgtccggcacaaagcgcaggccgctctcaaagatgcgcacccggctctgctgacggttctggttgtagaccacggtgcccagcaggccggtccacagcgacaggcgcatcgccgacatttcgctggagatcgggcttggcaggatcagcgcctcttccccggcgtggatcagctgctggactttcgggtcgacgaagctgtaggtgatcacttcctgatagcctttgtcgttcagcagcgttttcacgcgcttcagcgacaggtccgcttcgcgatgggttcccatgatcagacccgcctgcaccggctcgtcaggaatgttgttgtagccgtaaacgcgagccacttcttcaaccagatcttcttcgatctccatgtcgaaacgccagctcggcgcaaccgcctgccattcgccctcgccaaccgtcacttcgcagccgaggcgctgcagaatgtcggtgacctgcgcgtcgtcgatatggtggccaatcaggcgatccagcttgctgcgacgcagcgtaatggtggcgcgtgttggtagattctctttgctggtaacgtcaatgaccgggccggcttcaccgccgcagaggtcgatcagcagacgggtggcacgctccagcgctttatactgcagggccggatcgacgccgcgctcatagcggtgagaggcatcggtgtgcaggccatgacggcgcgcgcggccggtaatggacagcgggctgaagaacgcgcattccagcagcacgttttgtgtttcgtcgttaacgccggagtgttccccgccgaagatcccccccatcgccagcgctttgttatggtctgcaatgaccagcgtgtcgctgtcgagctttgcttcagagccatcgagcaggaccagggtttccccttctttcgccatgcgcaccacgatcccgccttcaatacggtcgcggtcaaaggcgtgcatcggctggcccagctcaagcagcacatagttggtcacgtcaaccaccgcgtcgatggagcggatcccgcagcggcgcagcttctctttcatccacagcggcgtcggcgctttgacgttgatacctttcaccacgcgccccagatagcgcgggcaagcctgcggcgcgtcaacctgaatcggcagcacgtcgtcaatcgtcgcggcaaccggcgtgatttccggcgcgttcagcggcgctttgttcaggacagcgacatcgcgcgccacgccaatgatgcccaggcaatcggcgcggtttggcgtgacgctgatttcgatggtgttatcgtcaagcttgaggtattcgcgaatatcggtgccgatgggcgcatctgccggcagctcgatgataccgctatggtcgtcggaaatacccagctcggagaaggagcacagcatcccctcagacggctcgccgcgcagcttcgcggccttaattttgaaatcgcccggcagcacggcgccgatggtggctaccgcgacctttagcccctgacggcagtttggcgcgccgcagacgatgtccagcaggcgttcgccgccgacgttgactttggtgacgcgcagtttgtcggcgttcgggtgctgaccgcactccaccacttccccgactacgacgccgttgaagctgccggcgaccggctcaacgccatctacttcgaggcccgccatggtgatctgatcggaaagcgcttcgctgtcgatcgccgggttaacccattcgcgtaaccacagttcactgaatttcattgttctgtcctgcccttatttaaactgtttgaggaaacgcagatcgttttcgaagaacgcgcgcagatcggtgacgccatagcgcagcatggtcagacgctccatgcccatgccgaaggcgaagccggagtagacttccggatcgatacccacgttacgcagcacgttcgggtgcaccatcccgcagcccagcacttccagccatttgccgtttttacccattacgtcaacttccgcagacggttcggtgaacgggaagtaggacggacggaagcggacctgcagatcttcttcaaagaagttgttcaggaagtcgtgcagcgtccctttcaggttggtgaagctgatatttttatcaacgatcagaccttccatctgatggaacatcggggtgtgggtctgatcgtagtcgttacgatagacgcggcccggcgcgataatacggataggcggctgctggttttccatggtgcggatctgcacgccggaggtctgcgtacgcagcaggcgagtggcatcgaaccagaaagtgtcgtggtcagcgcgcgccggatggtgacccggaatattcagcgcatcgaagttgtggtaatcgtcttcgatttccgggcccgtcgccacggtaaagccgagctcaccgaagaaactttcaatacggtcgatggtgcgagtaaccggatgcaggccgccgttttcaatgcggcgacccggcagcgagacgtcaatggtctctgcggccagacgcgcattcagcgctgcgccttccagttcagctttacgcgcgttcagcgcctgctgcacctgctctttcgcctcgttgatgaccgcaccggctgccggacgctcttccggcggcagctcacgcagggtggtcatttgcagggtcagatgcccttttttacccaggtattccacgcggacgttgtccagcgcagcaacatctgatgcctcgttaatggctgccttggcactggcaaccagctctgcgagatgtgacatggttttcctcattatgtcggtgcagacaccggttatagtgaaattaatattccgaatccatatacgaaaaaagcctccacaggggaggctttctggcgctgttttccgtttcttctttcacgcgcaagccccctgagttcaggtgctaaagtaaaaaaagaagcggaaaatagcagcattcatgcttgcattaccttgtctggtaagaaacgtcagagctgtattgaaaagcctgcgccgataaaagtcaatgtattgatggtgttgaaacgaaaagagggagacaagctccctctttcaactggcttatgccagagctgctttcgctttttcgaccagagcggtgaacgctactttgtcgaatacagcgatgtcagccaggatcttacggtcgatttcaacagaggcttttttcaggccattgatgaatttgctgtaagaaataccgttctgacgtgctgctgcgttgatacgtgcaatccacagttgacggaactgacgtttacgttgacgacggtcacggtaagcgtactgaccagctttgataacagcctggaaggcaacgcggtatacgcgagaacgcgcaccgtagtagcctttagcttgtttcaaaattttcttgtgacgtgcacgtgcaattacaccacgttttacgcgagccatgtgtgctctcctgtatctattctaagttaaaaaagttaaacgttaacgacttatgcgtacggcaggcacgcgataaccaggcccagatcgcctttggaaaccatggctttcggacgcaggtgacgtttacgcttggtagcttttttagtcagaatgtgacgcaggttagcgtgcttgtgcttaaaaccacctttaccggtttttttgaagcgcttagcagcaccgcgtacggtcttaatttttggcattttaataacttccacttcgcattgttaataaacgaaacaaaggcgaacaaaaccagtgagccgaagcccaccggaaatgtttcttgatggccttactgtttcttcttaggagcgagcaccatgatcatctggcggccttcgatcttcgttgggaaggattcgactactgccagttcaaccagatcgtctttcacgcggttaagcacttccataccgatctgctggtgggccatctcacgaccgcggaaacgcagcgtgatcttggccttatcgccatcttcgagaaagcgaatcaggctgcggagttttacctgatagtcaccttcatcagtaccagggcggaatttaatttccttaacctggataactttctgcttcttcttctgttccttagaagacttactcttttcataaaggaacttgccgtagtccatgatacgacaaactggcggctcggcgttagggctgatttcaactaaatctactccagcctcttcagccttttcgatagcttctctcagactcacaattcccagctgctcaccttccagacctgttaagcgaacttcctgggcgcgaatctcgccattaatacgattcggacgtgccgtttgaactcgttttccgcctttaataccttattcctccagttgttgaagactgcggctgcgaatctcttgttgcagcttctcgatcacttcatttacgtccatgctgccgaggtctttcccgcgacgggtgcgcacggccactttgccggcttcgacttctttgtcgccacagaccaacatatacgggacacgacgtaaagtgtgctcgcggattttaaagccaatcttctcatttctcaagtctgcttttacacgaatgcccgcattttgtagtttacgcgtcaattcgttaacgtattcagcctgagaatcggtaatattcatgaccactacctgcactggtgcaatccaggttgggaagaagcctgcgaactcttcggtcaggatgccaatgaagcgctccagagaaccgagaatcgcacggtgaatcatgaccggcacctgacgctcgttgttttcacccacataggaggcgcttaaacgctgcggcagagagaagtccagctgtacggtaccgcactgccatgcacgatcgaggcagtcatacagggtaaattcaattttcgggccgtagaacgccccttcacccagttgatattcaaatgggatgttattttcttccagcgccaccgccagatccgcttccgcgcgatcccaggtctcgtcgctaccgatacgtttttccgggcgagtcgacagtttgacgacgatcttctcgaagccaaaggtgctatacatatcgtagaccatacgaatacaggcgttcacttcatcgcgaacctgatcttcagtacagaagatatgcgcatcatcctgggtaaagccgcgcacgcgcatcagaccatgcagcgcgccagacggttcgttacggtggcagctaccgaattccgccatacgcagcggcaggtcgcggtaggatttcagcccctggttgaagatctgcacgtgacccgggcagttcatcggcttgatacagtattcacggttctcagaagaggtggtgaacatcgcatctttgtagttgtcccagtggccggttttttcccacagcacacggtccatcatgaacggaccttttacttcctgatactggtactctttcagtttagaacgaacaaacgtttccagttcacggaagatggtccagccgtcattgtgccagaacaccatccccggcgcctcttcctgcatgtgatacaggtcgagctgcttaccgattttacggtggtcacgcttggcggcttcttccagacgctgcaggtaggcattcagcgcttttttatctgcccacgcggtgccgtagatacgctgcaacattttattgttgctgtcgccgcgccagtaggctccggcggttttcatcagcttaaagtgatggcagaagcgcatgttcggtacgtgcggaccgcggcacatatcgatatattcttcatgatgatacaggccaggcttgtcatcatgggcaatgttttcatcaagaatagaaactttatagctttcgccgcgtttcacgaaggtttcacgcgcttcatgccagctcactttcttcttgataacgtcgtagtttttctcggcgagctcatgcatacgtttttcgagcgcgtcgatatcttcctgggtcagggtgtggtcgaggtctacgtcatagtagaaaccattatcgacaaccggaccgatagccattttggtgttgggccatagctgtttgatggcatggcctaacaggtgcgcgcaggagtgacgaatgatctccagcccttcttcatctttcgcggtgatgatagagagagtggaatcggattcgatcgggtcacaggcgtctaccagttcaccgtttacccgcccggcaatggtggctttcgccaggcctggaccgatatccagcgcgacatccatcggactaactgcgtggtcaaaatggcgttggctgccatcaggaagcgtaattacaggcattttatgtccttatttgcagtggtgccccgcacgaaagagcacatacaaaactatataatcataattatcatcaggttaaggcgcagttcccgcttcactctgcgaaaataggagcacgaccggaacgatcgctcccccctgcagccgcctgctgataacaccggggagtagtttacacatcattggtacgtgattaaagccgcgacagcataaatgatggcggaatgcggagaaaacaagagggccacggataaaaaagcagaatataagcgatgtggcgcggtaatattggccaatggcgccggacgatattattcggacatgataaaagagaggtagagatattacctgctgaatgtataccgcgggccattaaaccggtaccacttaacccggcttattagaccgctcgcgaaacgatagcctgcaatattaagaccactcgccggccatcagcgtatgcacattaaaggcgtcgttcatggattttccggtggtaggggcgccgggcgcaatattcgaaccagcctcaacgtcagtggctttggcgatacctacctgggtatgatcctgatgacccgatggcggaacgggcgtggcggctgatgcgccaaaagaaagcacgcacagcgccagggctgcgatggtataacgattgtttttcatgatgttaattctcttattacggaaatcagaccgggcaatgtcgccctccggtcagtgcttgttagtatagatccagatcacatatttgtccgtcgaatatttagctatttgtgtcaaatagaatgaatatttgtcaggcgctcgtgaataatggagaaaaaatggagggctatttcctttttacaaaaagtaaaacgaacggccagaaaaaataatatcactaattgctaaaaccaaaacgaacaggccggggaaaacccggcctgaaatattacatcttatacccgagggagagcgaggtccggcgatcggtatgctccggcgcggacgcaggcggctcagagttccaggtcacgttgtaggcgaccttcagggcgaaatgggcgttaatcgccacgtttaacgcgctctctgagttgaccgtggtgtcctcggcgccgaacaccgataccccttgcgaaaatttggcgttatcggtcatctgccaggcccatgtacccgaagcataacccagcggctgggtatcagtatccccgtcggtatattcgtcataacgaacgccaggaccgaattcaaaccgcagactgtgcaccggcccgttgaggatctgacgaccatagcccgccgtcacaacatcgcgctgttgatagccgttgtagcggtcagttagccagctaccctgaccaaaaacatagttcatatcggtcaggttgtagcggctacgtccgccgacagcatatttttctgaggatcgctcatcattggacgacgtgttgctggcgttgccccacagcgaccaggcggtggtattaccataccaggtcagggtggaatccgccgtcatcgaagagctcttggtgttgccggactgcgccaggtagcctgcgttaaccaccccttcgaacggttttttggcagcggaagggtcatccatgacggtaaatacagaatcatcggccattgcgccaacagacgcaaaaagcccccccgccagcataaccgctgcgggtactgtctttaaaagcttcattataactctctaaaatacattttttaggacagtacaaatgatgaacaggcataatctcgccggctcattgaatttagcgtccgtacaacataaaagagacctgagggtcccggaaactttcgcgaggatcgcggagtgcaggtcctaagaaaggtagcaaattataaaaaagcacgaataacatagcaatcacttactctttcgttttttgaataagacagctccggaaacaatctttatttcataatgaaaatagaggcatctttgcaaaactgtcaggaactggactttccctccccgagtcatcgtgccatgcttaaattaacgacagtcgccgtattaaggaggagaaggaatgaccaaaatttacacgctcacgctggccccctcgctggatagcgccacgcaaaccccacagatctacccggaaggcaaacttcgctgcagcgcgccggtatttgaacctggcggcggcgggatcaatgtggcccgcgccgtgacctttctcggcggcaaagccaccgccattttcccggtcggtggcgctaccggcgagcatcttgccgccctgctggccgatgagcaggtgccggtcgagaccgtcgaaacccgcgactggacgcggcaaaacctgcacgtccacgtggccgccagcggcgaacagtatcgcttcgttatgcccggcgcggcactgacggacgatgaattccgccgtctggaagagaaggttctgactatcgaacccggctctctgctggtggtcagcggcagcctgccgccaggtattagcgtcgataacctgatgcagctggtgaaaaatgcgcaacagcagggactgcgctgcatcattgacagttccggcgatgcgctggccgccgcgctggacgtcggcaatattgagctggtgaaaccgaaccagaaagagcttagcgccctcgtgcagcgcgatctcagccaacccgatgacgtgcgccttgccgctcagtcgttgatccagtccggtaaagtgcgccgggtggtggtctccctgggtccgcagggggcgttaggcgtggacgccagcggcagcgttcaggttgtgccgccaccgatgaaaagccagagcaccgtcggcgctggcgacagcatggtgggcgccatgaccttgcgtctggcggaaaacgccagccttgaagacatggtacgctttggcgtcgccgccggtagcgccgcgaccatcaaccagggcacccgcctctgctcgcgggccaatacgcaaaaaatctatgattatctctgcgggcgttgatcttccctgccccctccgcgcaggcggaggggaatcacaatataagcaggatggtctatgctggaaaggccatgcataacaacggggtgtagagatgagtaatgagattaccgcctgggtcgtcagcgtgaccttccatgaacaggcgctgacggagatcaatgaggtcagcaaccattttacccgtgccgggtttgtactgacgctcaatgatgaagagggcacgccccatgagctgggtaccaacaccttcggcctgctgagcggccagacggccgaggaagttaaggccctcagcgctggcctggcggaagcggcccttggccgcccggcggaaatcgctgtggccacattcaccgagtggttaaaagctcaataagtgcgtttagcgcaacggaaagcgtcagttgtgcgtcagttccaggtttacccggtagtaatgcgctaaccttatgatatggtggaaaacatggggagagacagcatgtggcaagcaatcagtactcttttacgcgattggcataccgaagacgctgaaatcgaactgaaaaccgagctgcccggtggagagattcattccgcctggcatttacgcttcggcgggaaagattacttcgtgaaatgcgacgaacgggaacttctgcctatcttcaccgccgagtccgatcagctggagctgctgtcgcgaagcaaaaccgttcgcgtaccgcaggtctttgccgtcggcagcgatcgcgactatagcttcgtggtcatggagtacctccctccccgtccgctggatgcgcacaatgcgtttctgcttggccagcagctagcccacctccatcagtggagcgatcagccgcagttcggtctggattttgataacgatctttccaccacgccgcagcccaacgcctggcagcgtcgctggtcggttttttttgccgagcagcgtatcggctggcagctggagctcgcggcggagaagggattgcactttggcgatatcgataccttagtcgatatggtacagcagcgactggccaaccatcagccgcagccttcgctgctgcacggggatctgtggtccggcaactgcgccttagggccggatggcccctatatattcgatcccgcctgctactggggcgaccgcgagtgcgatttagccatgctgccgatgcatccggaacagcccccgcaaatctatgacggctatcagtccgtttcgcctctgccgtcgggttttctcgatcgtcaaccgatttatcagctttatactctgctgaacagagcgattttgtttggcggccagcacctggtaacggcccagcaggcgctggatgatgtattgatggagaaaatgcgttaaacaagcttcacggcggaccttgcaggtccgccgcagcgttttatcagttaatctcgacgccgttcaggcggaatttgatggtcatcgttacgccggtacccggtcttccctgctcataacgccatctgcgcatcgcgcttttcacctcgcgttcgaacatattcgccggctgagcagagaggatctgcagattatcaatgcggccatcaggcgaaacgtcaaacttcacccgtaccgtcccttcaatgcgcagcgcctgagcgcgcggcggataggacggctgaacgcggctgatcgcccgcgggccgctcggagcagtaacggtgggtttagccgctgcggtcgaggtacttggcgctgtacgcgccggcgccgtattgttgttttcaaacggcgaggccggacgcggctctgctgccggcttcacttcccgcttcggctgttcaacctttttctccggcttaggcttgggtttaggtttgggcttcggcttaggttccggtttatggatcaccaccggcgcctctttcggcggttcaggcactacctctggctccggctcaggttcgggttcaacaacgggctccacgacaggctgcgccgccggaggcggctcaagatcggccggcgccaccattgtgatctctatcggctgcgtcggagaaggctgttcaataacctgatgtaccgaggtataaagcagccccgccacaacggcaccgtggatagccacggacagcagcgttggccacggaaagcggcgaggtaaatcaagggtcattgcgctcatagtcgtttctgttgaaaaatgatgctccgattttaaatgcaaatagcaatcatattcaataaggcgtcttaacctgagtcaatttttgccgccatttgcagaaaaaagctgcgtcggcagtgctttccactccagagcgcatctttgcattgcagtccatcgctgtttaacttaacgtaattcgcctgattattgataaggagctttgccgtgctttacgttatctacgctgaagatatcgccgattctctggaaaagcggctgtcggttcgccccgcgcatctcgcgcgtttacaactcttacacgatgaaggccgactgcttaccgccgggccaatgccggccgttgacagtaacgaaccgggcgcagcaggattcagcggctcaacggtgattgccgagtttgaatcgctggaagcggcccaggcctgggctaatgacgatccgtatatcgccgccggggtttaccgccaggtctctgttaagccatacaaaaaggttttttgaaaataccctttcctttttctggctaaccacaaaaacacccaggtcatcagaatgaagggcgcattttggtacacaacattgaaatgtcgccctttttaacctcgcgaaagcgttgactgttatacgcctgagaagcctggaagatgagcacgcaccttctcctgctaccccatcatcgaccatcgcctcgcttttttcggcaatagaaaatgctgacaaaacatcgacgccgcgcgtgatagtgaattactaataccttgtgtaaggctgttagggaggatcgcgttgttatttagcgcttgcatttaatgtcagcacatcctgatatagccctataaatctacagtgcaatagaaagaaaaaaataactgaaagatagttgcttaacgacagatatgaaagcctgaaaaaaaatattattgggcatccactgcggatgccgcggaaccgaacgtagcccatcttgctatattcaggaccgtagccgcttgaaagcacatggaaataacacccctgtagacaaaggtttacctggcaggcataaaggggtattaactacgctgccagcgttaagttgctgagcatcatttttaaagcctattaatttcgttgcgtaaacttcacgcagagtgatagtaggggcatcactgcttgattaaaaaatttgaaagggaataacaaatgttttcaataagccctgtatttttttgggctaacatttatgtacctgccgattttgaggattattgtgtgaataccctgaaaaaaaccgcattgctttctgtacttgccttatatattcctgtgtcgcaagccgcggctaaggaatacagtcttgatccacagcatacctcggttgtgatctcctggaaccatttcggcttctcaaaccctaccgcctatatctctgatgtttcagggaaactggcctttgataaagagaatccggagaaatcctcggtgaacgtcacgctgccagtgaaaaccattgacgctcacgtcaaggcgttaacggatgagtttttaggcaaagagtattttgatgttaaaacgtttcccgacgccactttccagagtaccaaagtggaaagcaaaggcgacaataaatatgatgtggaaggtaatttgaccattaaaggcatcaccaaaccggtggtcctgcatgccgtcctgaataagcaggatatgcacccaatggtgaaaaaagaggccattggatttgatgccaccggggtgataaaacgttcagactttaagcttgataaatatgtgccggcggtaagtgataacgtcaccatcacgttatccacggaagcctatgcaaaataagtaaaagctggcgcaacgattgcgttttattcaggatgcttattgcatggcctctctggataatataacaggctcagattattcatggtcaggatcggtcggttcattgagcttcaacgcgctggaccgcttaataacccccttgcctgtctgagtctgttttctcattccctcagttcccgcctggttaccgcagctggccggtcatatcattaagcatttaacaacgccatgcccttcctgagcggcaataaatgctatctgacggttaattcctgtcgcgccgcaaacgacctggctctggatcttgtcgtccgtcattacaagccaggcgtagcatctctctttcactgaggcgggagctctgttttgtcgtcgcatagcagcatgaaaaaccatcattgccctatggcgatgtgcaacgggaatttagcgcagagagaaaacgacaacggcaccgcgtacggtgccgtttgcctgctcgcttagctgtcagggaagataaacagcagggcatgacgctgccgtttcaccagtcccttcctgatagcgaggatccgcatattgcggcgcgattgggcttccagccagcgcgctttacggcgattcacctgtctcagcatgcgccagcgccctacttccgttctactacgcttcattgcaacgactctacgagtgaaaacagcccccattataaacctctgccagcaactgactaccgctttcgctgcgtttttatttgccagaaaaatactgatgcgtaaactcatcacatatcgtcattcaaaaggattttacatctatgacaaccttttacacggtggtgaactggctggtcattctggggtactggctgttgatcgccggtgtaacattacgaattctaatgaaacgccgcgctgtcccgtccgccatggcatggttgctgatcatttatatcctgccgctggtggggattatcgcctatctctcctttggcgagctgcatctcggcaagcgtcgggccgagcgcgccagggcgatgtggccctcgacggccaagtggctaaacgacctcaaagcctgcaaacatatcttcgcggaagataacagcccggtggccgaatccctgttcaagctgtgcgaacggcgtcagggcattggcggcgtaaaaggcaaccagctacagctgctgacggaatctgacgacgtgatgcaggccctgatccgcgatattcagctggcccgtcacaacatagagatggtcttttatatctggcagcccggcggcatggccgacagcgtcgctgaatcgctgatggccgccgctcgccgcggggttcactgtcggctaatgctcgactccgcgggcagcgtggcctttttccgcagcccatgggcggcgatgatgcgtaacgccggaattgaagtcgtcgaagctcttaaggttaacctgatgcgcgtattcctgcgccggatggacctgcgtcagcatcgtaaaatggtgatgatcgataactatatcgcctacaccggcagcatgaatatggtcgatccgcgctactttaaacaggactcaggagtcggacagtggattgatctaatggcgcgaatggaaggcccggtggcgacctcgatgggcatcgtctactcctgcgactgggaaatagagaccggcaagcgcattctgccgccgccgccggacgtcaatatcatgccgttcgaagaggccagcggacatactattcacacgatcgcctccggaccgggctttccggaagatctgattcatcaggctctcctcaccgccgcctatgcggcgaaagagcatctgatcatgaccaccccctacttcgtacccagcgacgacctgctgcatgcgatctgtaccgccgcccagcgcggcgttgacgtgagcattattttaccgcgcaagaacgattcgctgctggtaggctgggccagccgggccttcttcaccgagctgctggcggccggggtcaaaatctatcagtttgagggcggactgttgcataccaagagcgtgctggtcgatggcgagctaagtctggtggggaccgtcaacctggatatgcgcagcctgtggctcaacttcgagattaccctggtcatcgatgacgccggtttcggcagcgatctggcggcggttcaggatgattatatctcgcgctcgcgcctgctggatgcccgtctctggttaaaacgtccgctgtggcagcggatcgccgagcgactgttttacttcttcagcccgttgctgtaaaacgtgcccatcagataccgaatgagtagcaatcatggatatggatttaaacaaccgcctgaccgaagacgaaacgctcgagcaggcttacgatatcttcctcgaactggcggccgacaatctcgacccggcggacatcattctgtttaacctgcagtttgaggagcgcggcggcgccgaactgttcgacccttcggcagactgggaagagcatgtggattacgatctcaacccggatttcttcgccgaagtggtgattggtctggcggataccgacggcggggaaatcaatgatatcttcgcccgcgttctgctgtgccgcgagaaagatcataagctgtgccatattctgtggcgtgaataacctttaacatccagtaaaaagcctgccgcggttctcccggcaggcttttttatgtcgccagcttacttcggcaaggcatgaccgcaggcatggcagaaacgggcgttatcgtcatggtcgccctgctgacactgcggacacaggcgctgctgtcgtcgacgattcagggcgctggtcatatgtgtggtgataagtccggtcggtatggcaataatggagtagccgatcaggataagaatggaggccaggatgcgacccaacggcgtgtgcggcgtgatgtctccgtagccgacggtggtgatggtcacgatggcccaatagaccgaggcgttaagcgtggtaaagccgtattccggcccctcaatcagatacattaacgagccgaaaatcaccatcacaatggcgataaacgaataaaacaggatcagctgatggcgcgcgctgacaatcgctcgccagaatacgttgagcgaaggcataaagcgcagtagtttgagaatacgcagcgcgcggatcgcccgcattgcccgccaggcgaatacataattgaggctaatttccggccatagccacatcacatacagcggtaaaatcgtcgccaggtcaatcagcccccaaaagctgaaaatatagtggagcggattgggccaggtagcgatacgcagcaggtattccagggtaaagaccgcggtcaccagcagctccagccagacgaaaatatgccattcatctaatgtcaggtgatattgcgtgcccagtcccgactcgataaatatcaccagtacgctgagcagggcgaaaagtccgcacagcccttcaaagcggcggccggaacgtcggttctgatcgaaaagtaaatgataaagccgcagacgagcggcagaaagcatacccacttcgttaacctcgcaaaaaaaaagggctgacctgcgtcagcccctgagattataacgggtctaccttaaggcaggaaaccgcatggcggaaactgccttccagcaccgggcgggttttggcgcactccggtccggcaagcggacagcgggtgcggaatacgcagcctgagggcggattaatcggcgagggtaattcgccttccagcagttggatagttttcgttttctcgagatcaggatcggggatcggcaccgccgacatcagcgctttggtatagggatgcagcggattatggtacacctcgtcgtaggtccccagctccaccgcatggcccagatacattaccagaacccgatcggagatatgcttaaccaccgccagatcgtgagcgataaatatcagcgatagccccatctcacgctgcagttgctgcagcaggttgacgacctgcgcctgaatcgacacgtcaagcgcggagaccggctcatcgcagataatcagctttggctcaaggatcagcgcccgcgcgatgccgatacgctgacactgaccgccggagaactcgtgcggatagcggttgatcaggttgggcagcaacccaactttcatcatcatcgctttgacgcgatcgcgcacttcctgacggggcatcttcggatgataggtacgcagcggttcggcgataatttctccgatggtcatgcgcgggttcagcgaggccagcggatcctggaagatcatctggatatcgctgcgcacgtcgcgccactcttcctgcttcatgcccagcagatctttacccagccaggccactttgccatcggtcgctttcaccagaccaataatggcgcgggcgaaggtcgatttgccgcagcccgactcccctaccacaccgagggtttcaccctcgtaaaggcgcagcgtcacgccatccaccgctttcagcgttttcgacggctgccagaaccactgcttgccatctttgatatcgaagtgcaccttcaggtcggcaatttcgagcaggacttttcgttgttcagttacggcgttcatagcagatcccccaccggtttaaagcaggcgcgcaggcggcctggcgcgaacgattccagcggcggcgcgctgctgcactgctccatggcatgcgggcagcgcggctggaatggacagcctttcggcaatcgcagcaggttcggtgggttgccgggaatggtcaacaacgcatcgccttccgcatccagacgtggaaccgcattcaacagcccaatagagtatgggtgcgacggttgatagaagacatcgcgcgcctgaccgtactccatggtgcgcccggcgtacatcaccagcactttatcgcagatccctgccaccaccccaaggtcgtgggtgatcatgataatggccgtgttgaattcgcgtttaagctcattcaacagcgtcatgatctgcgcctgcacggtaacgtccagggcagtggtcggttcatccgcaatcagcagccggggccggcacagcagcgccatggcaatcatcacgcgctgacgcatgcccccggagaactcgtgcgggaacattttcatgcgcttacgcgcttccggcatttttaccgcgtcgagcatcttcaccgactcttcaaacgcttcggctttactcagccctttatgcagcatcaggacttccattaactgctcgcccacccgcatataggggttaagagaggtcatcggatcctggaaaatcattgagatttgttcagcgcgcagtttgttcagctcacgctcgggcaaattgaggatttgccgaccgttaaaggtggcggaacccccgatgcgaccgttggccgccagcagtcccatcagggcgaaggcggtttgcgatttaccggagccggattcgcccacaatgccgagcgtctcgcccgcctgcagggtgaagttcagatcattgacggcggtgacgtcgccatccggcgttttaaaggtgacgcgaagatctttcacgtccagcagtagtccgctgtggctctgcgcttgcggcgcttttgccgtttcaatcatggtcatggcagcgctccttagcggtctttcgggtcgagggcatcacgcagaccatcgccgataaagttgaaacagaacagggtcaccaccaggaaacccgccgggaacaacagtagccagggcgaaacttccattgagttggcgccatcgctgagcaatgccccccagctgctgagcggctcctgcgtccccagtcccaggaaactgaggaaggattcgaagaggatcatgctggggaccagcagcgaggcatacaccaccaccacccccagcacgttggggacgatatggcgcagcacgatgctcgccgtcgagaccccgccgacctgcgcggcttcgataaactctttgcgcttcaggctcagcgtctgcccgcgcacgatacgcgccatatccagccaggacaccatgccgatggcgacaaagatcagcaggatattctgaccaaaaaaggtcaccagcaggatgacgaagaacataaacgggaaggagttgaggatctccagcagacgcatcatcaccgaatccactttgccgccgagataaccggagagcgaaccgtacagcgtgccgaggatcaccgccaccagcgccgccgccaccccgaccatcagcgaaatgcgcccgccgatcgctacgcgcaccagcaggtcgcgcccggaggagtcggttccgaagtagtggccggaggccatatccggggcattggacatcatgccccagtcggtatcgaagtaggagaacgacgataccatcggcgcgaaggtaacgaacagcgcaattagcaccagcataatcaggctggtcaccgcggcgcggttatgcataaagcgacgacgcgcgtcctgccagaggctacgcccctccacttccagcttctcactgaagttttccagcgcctcgctatttttcttacttaacatcatggcgaactccggcttcagtagcgaatcttcggatcgataacggcgtacagcacgtcaacgatggcgttgaacaggatagtcagggcgccaacgaggatcgtcaggctgagcaccagagagtagtcgcggttaagcgccccgttaacgaacagctggccgatccccggcaggccgtaaatggtttcaatgaccattgagccggtgataatgcccacgaaagctggccccatataggagagcaccggcagcagcgccggcttcagcgcatggcgcagaataatgcgacgcatcggcagccccttcgcccgcgcggtgcggataaagttagagtgcagcacttcaatcattgagccgcgggtgatacgcgcgatgctggcgatataggccagggaaagcgccaccatcggcaggatcataaatttcagcgccccgccgttccagccgccgcccggcagccagtgcagggtaatggcaaagatcatcaccagcagcggcgcgaccacaaagctcggaataaccacgccggtcatggctacccccatcaccgcgtagtcccagcgggtattttgcttcagggcggctatcaccccggcggcaacgccgatcaccaccgccagtaaaaaggcggcgaagcccagtttcgctgaaaccgggaagctggcggccaccagatcgttgacggaataatctttgtatttaaaagagggaccaaaatcgccatgcgccagctgcttcagataattgaagtactgcgtcatgatagggtcgtttaaatggtattttgcttcaatattcgccatgacttccggcggtagcgtgcgttccccggtaaaaggacttcccggcgccagacgcatcatgaagaatgagatggtgataagaataaatagcgtcggaatcgcttccagacagcgacgtaagataaattttaacattgcccgtaccttctggcgtgtgcctttgcactgctctcaaataagacacgatggagcgagccgagacccgctccacgtattgccattaatgtttgataacgtagaggtctttggtatagacgttatccatcgggtctttaccggtatagccaccgacccacggtttcaccaggcgggcgttaacgtagtaatagaccggtacgatcgcgctgtctttgtccagctgctgctctgctttcgcataggccgccgtgcgctgcgcttcatcggatgcttttacggattcagccataatcttgtcgaacgccgggctcttatagtgcgcggtgttcattgaactgtcagagagcatggtgttcaggaaagaagttggctcgttatagtcggcgcaccagcccgcacgcgccacgtcataggtgccctgatgacgggtatcgaggaacgttttccactcctggttgaccagcttcacgtcaatgcccaggtttttacgccacagcgaggcggcggcaatcgccagtttcttgtgcaaatcagaggtgttatacagcaggttgaaggtcaacggtttatcggcgctatagccggcttcggccagcagtttcttcgcttcttcgttgcgtttttcctgcgaccaggtaaaccattccggctcgctcagcttcgcgccatcggtgtaaggcggcgtgtagccgtaggccggcagatcgccctgtcctttcaccttattagcaataatatcgcgatccaggcccagcttcagcgcggtacgcacgcgcacgtcggtgaacggggccttctggttgttgatttcgtaataataggtacacagataggggtcaacgtgcagctcgttggggatctcttttttcagcttctggaagagttcgatcggcagctggttataagtcatgtccagttcaccgctgcggtagcggttaacataggtcacttcggaagaggtcggcagccaggtaacggtgttaatgacggttttagcattatcccaatagtgcgggttacgctccatcacgatccgctcgttgaccacccagtctttcagagtatacgcgccgttggtaacgatattgccaggctgcgtccacttttcgccaaatttttcgatggccggtttgtagacgggagacatcgccgggttaaccagcagtttataaaaatagggtaccggttcgctgagggtgacttccagcgtgtggtcgtcaatggcttttacgcccagctcgctcggcgcttttttgccgtcaatgatttcgtcgacgttaacgatatgaccatattgcggatagctggcataaggagacgcggttttcggatccaccagacgctgccagctgtatacgaagtcctgggcggtaaccggctcgccgttagaccattttgcatctttacgcagatggaaggtccagactttaaaatctttattatcccagctctccgccacgccagggatcgggtggccatctttcggcgaagtattcagcaaaccttcgaacaggtcgcggctaatattggcctctggcaccccttcgattttatttgggtccagcgattgcggctcggcgccgctattacgtaccagggtttgcttctctgccagctgcacaccagccgggacatccgctgccattgccatattgccggcgatcagtgcggatagcactcccgcggcgattaaacgctttttagtgatgatggtcattgtgttgtaactccagtcattataattactggttttttaaccagcctgtttttcccgttttcgggttctgtccaacgcaggagtttgcgattggcagattgctatcaccgacttatttattacgaccgctcgaacggcagtcttaacgtcgattcgttgccctcgctggagggtcgttctggcgaaatgagttaattaaaaataattctcatttgcgtacataattcagcagacgataacggcggaaagtaccaaaaggtaaacacctccgccaatgcaatttgcaaatatgttaccgaattctcttttattgccggttttgccagcgtgacaagcgtttgccataaaacgtagatgtaaaaatattattatttatcagagcattacgataatttcatcagccgacattcagagcagcgaccacaagatggttttttgtacaaaaatttaacaatagattactttttagcacattcatctgccgccttgttaaaattactaatatcatttcgatgatccgacagcaagtaccagagaatgatgtgaggaaaataacatcacaggagtgggaggcgtgaggagaatgttaagagaaatatttcatatcttaatgaaaaatatgaaattaatagcgatatcgcaaaatattatccctaccgccagttccgcgttggctaataggttttgctaataatcgcgcaggcgtgaagcgagactccccgcctgctggcgacgaactaactcagcagccctgggaaaagcgctttaatcccggtcacaataaactcaatgccgagagccatcagcaacaggcccataatacgggtgatgacgttgattcccgtctgccccagcaaacggaccagccacggcgccatacggaaaatcccccagcagcagagggcaaataccgctatcgccagtgagaacccgaccagatgcacccaggagtggtaccgggtcccccagacgatagttgaactgattgcccctggcccggccattaatggtagcgcgagaggaacgacgccgatgctctcccggaccgccgtctccgacttttcctgcttgttctgcttatcttcgccgagcttaccgctgatcatcgacatcgcgatggtcaccaccaggatgccgccggcgatacggaaggagtcaatggagataccgaaaatctgcagaatgccatcgccgaggaacagcgacgtcaggaggatgatcgccaccgacaggttggcggtgaggttggtcttattacgcaccgcagccggctgatagctggtcatactgatgaataccggaataatgccaaccgggttaaccagggcaaataagccgatgaaaaacttgaaatatgcagaaaaatcgaacagtgattgagtcacattgggctccgcagcatcatcaaaattggcggttgactgttaacagcataaaataactgcgcgaaacatacgctttttacctgcaatattcattataaatatgcataacccggtgatatgtatcgaatgttagccatttgtatatttaatgctaatcgtttttttaatttcaaaaccctcccatcacacttgatcgaaccggtcaaaaagcagccagctgaaaggtatcagcagcgacaatacttgatctaaatcacgtaatttgtactcagaagtgagtaatcttgatgacaccaacagagtggaaggcagcagtacctgaaagcgaaagagataaagcttttttagtaaatcggtgaaacagcgccctgatttttctacataaacatttacatgcaagctgttaacggcctgtctataatgtcgaatcgagcgactgatttactaaaaaagtttaacattatcaggagagcattatggctgttactaatatcgctgaactgaacgcgcttgttgagcgtgtcaagaaagcccagcgtgaatatgccagtttcactcaagaacaagtcgacaaaatcttccgcgccgccgctctggccgctgcagatgctcgaatccctctcgccaaaatggccgtagccgaatccggcatgggcatcgttgaagacaaagtgatcaaaaaccactttgcttccgaatacatttacaacgcttataaagacgaaaaaacctgtggcgttctgtcagaagacgacacctttggcaccatcactattgctgagcctatcggcatcatctgcggtatcgtaccgaccactaacccgacttcaacagccattttcaaatcgctcatcagtctgaaaacgcgtaacgccatcattttctctccgcacccgcgtgcaaaagaagccaccaacaaagcggctgatatcgtgctgcaggctgccatcgcggccggcgcgccgaaggacctgattggctggatcgatcagccgtctgtagaactgtctaacgcgctgatgcatcacccggacatcaacctgatcctggcgaccggtggtccaggcatggtgaaagcagcgtacagctccggtaaacctgctatcggcgtcggcgccggtaacaccccggtagtcattgatgaaaccgccgacatcaaacgtgccgtagcgtccgtactgatgtctaaaaccttcgataacggcgtgatctgtgcttctgagcagtccgttgtggtggttgattcagtctatgacgcggttcgcgaacgtttcgccagccacggcggctatctgctgcagggtaaagagctgaaagccgttcaggacattatcctgaaaaatggcgcgctgaacgcggctatcgttggtcagccagcggccaaaatcgctgaactggcaggcttcaccgtgccggccaccaccaaaattctgattggtgaagtgaccaacgttgacgagagcgagccgtttgctcacgaaaaactgtctccgacgctggctatgtaccgtgcaaaagatttcgaagacgcggtagccaaagcagaaaaactggtcgccatgggcggtatcggccacacctcttgcctgtacaccgaccaggacaaccagccggctcgcgtggcttacttcggccaaatgatgaaaaccgcgcgtatcctgatcaacaccccggcttctcagggtggtatcggtgacctgtacaacttcaaactcgcgccttccctgactctgggttgtggttcctggggtggtaactccatctctgaaaacgttggtccgaaacacctgatcaacaagaaaaccgttgctaagcgagctgaaaacatgttgtggcacaaacttccgaaatctatctacttccgtcgtggctccctgccaatcgcactggatgaagtgattaccgatggtcacaaacgcgcgctgatcgtgactgaccgcttcctgttcaacaacggctatgccgatcagatcacttccgtactgaaagctgcgggtgttgagacggaagtcttcttcgaagttgaagctgacccgacgctgaccatcgtacgtaaaggtgccgacctggcaaactcctttaaaccagacgtgatcatcgccctgggcggcggttccccgatggatgcggcgaaaatcatgtgggttatgtacgaacatccggaaacccacttcgaagaactggcgctgcgctttatggatatccgtaaacgtatctataagttcccgaaaatgggcgtcaaagccaagatggtggcgatcactaccacttccggtaccggttctgaagttacgccgttcgccgtggtgaccgatgacgcgaccggtcagaaatacccgctggcagactacgcgctgaccccggatatggccattgtcgatgccaacctggtgatggatatgccgaaatcgctgtgtgcgttcggtggtctggatgcggtgactcacgccctggaagcttacgtttccgtactggcttctgagttctctgacggccaggcgctgcaggcgctgaaactgctgaaagagtatctgccggcttcctatcacgaaggttccaagaacccggttgcccgtgagcgcgtacacagtgccgcgactatcgccggtatcgcgttcgctaacgccttcctcggcgtgtgtcactcgatggcgcacaaactgggctcccagttccatattccgcacggtctggccaacgccctgctgatctgcaacgttatccgctataacgcgaatgacaacccgaccaagcagaccgcgttcagccagtacgaccgtccgcaggctcgtcgtcgttacgctgaaatcgccgatcacctgggcctctccgcaccaggcgaccgcaccgcagcgaaaatcgagaaactgctggcatggctggaaagcattaaagctgagctgggtattccgaaatctatccgcgaagctggcgttcaggaagctgacttcctggcccacgttgataaattgtctgaagatgcattcgatgaccagtgcaccggcgctaacccgcgctacccgctgatctccgaactgaaacagatcctgctggatacctactacggccgcgaattcgtcgaaggcgaagccggtgcgaaagccgaagttgctccggtaaaggctgagaaaaaagcgaaaaaatccgcttaaccaagagcgatagcatcgcgacaagccccgtcacctgacggggctttttttatccccgctatcagccattctttatcgccagctacgccaacctatagcagacattaaaaaggcgcccacaggcgcctgtacgagcttctgagggtatcagcagggacggtgctggttttgtaccttggttaacgaaccgacgctcagcgcctctttataatgcttacggcagaccgatacgtaccgctcattaccgccgatgacgacctgctcaccctcattataaggacgcccctcctgatcgaggcgcaataccatgctggccttgcggccgcagaagcagatcgttttcagctcaaccagcttatctgaccaggccagtaaatactggctgccggtaaagagctcaccgcgaaagtccgtccgcaacccatagcaaagcaccggaatatccagcgtatcgacaacttcggacagctcatgaacctgttcacgcgtcagaaactggctttcatccaccagcacgcagtgaatcggctttagctggtgctccgccgcaatatcgtcaaataacgaggtctgtggattatacaatcgggctggcgaggagagcccgatacgcgaactgacttttccggcgccaaagcggtcatcaatctcagcggtataaacgacggtacgcatcccccgctcctggtaattgtacgaagattgcaacagagcggtcgacttacctgcattcattgcagagtagtagaaataaagttgtgccatcggctgcgtgaccccaatcaaagtgttttatcgcggcgacgattgtaccatattttatgcgcacagccgcgctttcagcaggggtattgtcgcgaagctgaagggcctgcaaaccgaaaggattaagaagatgaattgaattttcagggccactatttgtacgccccgttacgctactggcgcggtaaccattgtcttttcgtgcttatagaccggttgcccaggggctataagcagggctgccggttgttttatattaagccttgtaaccaaaaatgcgctaatactgacgagggttatttacccatgtaaaggatcatttctctcactgaacctctcaaaaagcataccgtctcaatgttttagcttgccttcgcctcatcgctataagcgatgaaagatgtgaagcggcacgggaattttaacttaaattaattaattctcgcgacaaataaccagtaattttgaattccttacattcccccctattgcacaacgcattttatcgctctattattagttcaacaaaccaccccacaatataagtttgagattactacaatgagcgaagcacttaaaattttgaacaacatccgtactcttcgtgcgcaggcaagagaatgcaccctggaaacgctcgaagaaatgctggaaaaattagaagtcgtcgttaacgagcgccgtgaagaagaaaacgctgccgcggcagaaattgaagagcgtacgcgtaagctgcagcaataccgtgaaatgctgattgctgacggtattgatccgaatgaactgctgagcaccatggctgccgttaaagccggtaccaaaaccaagcgtgctgcacgtccggctaaatatagctatgttgacgaaaatggtgaaaccaaaacctggaccggtcagggccgtaccccggctgtgatcaaaaaagcaatggatgagcaaggtaaatcactggacgatttcctgatctaatctccgttgatcgctataaaaaatcccgctgcggcgggattttttttgccctcagggccgatataaaaaaaccgggagtcgcagatgcgctcccggtttgtgctttcaaccgcgcggcggattacttcgctaccgccgtttccagccaggctttaaaatcgtcgcccagcgttttgtgacgaataccatattcgacaaacgcctgcatgtagccaagcttattaccgcagtcatggctcttgcctttcatatgataagcttcaaccgtttctttctcgatcagcatatcaatggcgtcagtcagctgaatttcatcaccagcgcccggaggggttttcgccagcagcggccagatatcggcgctgaggacataacgccccaccaccgccaggttggacggcgcaacgtcagcttttggcttctcaaccacgcccaccatcggtacgctttcgcccggcttcagggattcgcctttgcagtcaaccacgccataagcggttacgtcttcgacaggttcaaccataatctggctggcgccagtctcatcgaagcgagagatcatctcagcgaggttatcgcggctcagatcggattcatattcatccagaataacgtctggcagaataaccgcgaccggctcatctcccactaccggatgggcgcacagcaccgcgtgacccagacctttcgccaggccctgacgaacttgcataatagtcacgtgcggcgggcaaatagactgcacttcttccagcagctggcgttttacacgtttttccagcatcgcttccagctcaaaactggtatcgaaatggttttcgatagagtttttcgacgagtgcgttaccagaacaatttcagtaattcctgcagcgatacattcattaacaacgtactgaattaacggcttatctaccagcggcagcatttcttttggaatcgctttggtggccggcagcatcctggtgcctaatcccgcaaccgggataaccgcttttctgactttagaattaagggcagccattgaaatctcctggactgtttgttttttaaacttctcgttacaaataacgtgtcgagtatatcagtcaaccgcgtatttactggtctgaaaagctgccgatagcctcgaattaggacttttacgcataaaactgctcgatgttaccaccgctaaagggcaagaggtaatcccgtctgcttagatataaacgcaattgctcattccgcagacaacattaagcgtaaacgaccgccagccccccaaatttggcactgccacgaggtgcagcgttggctaatttggttaagataagcatcacccagtgtccccaaaggaacgccattactaatctgaatttgatgctcccccgtattcagcgtgccattaagtcccgctgacaccagaattaaatttttcagcccgctgtggtaataccctactaacagagggaactggcccggaagatttgcctgacgcagcagttgattcacctgttttaacaaacttcccatttctggtagccgttgtccctggtgcgccagttgctcctgcagcagaccattaaacaacgcgcgcagcaataatgctgccaacacgccattatcgcctgcgcgtgtgacatccagacaatagaaagccaaatcattttccgaaagcggcgcgatatcaagtaccagaccgggcttgtctgccgacaccagttgtcgataatgaacgcggcagtgcgacatttcctgttgcaccggcggctgtaattcctgcaatagtcttgaagcggcgatgggattactgaccagcgcatcccagtcctcaaataaacgctcttcctcttccacgcgcgaactgaacatcgcgggatagagacaggcgtaaacggtctcgcgcaggcgatcgaaatcttttactggctttaacagcacgtcctggacgccaagtcgcaacgctttagctatatccgccatgttttcggtggcggagatcatcaggatcggtaactgttcgccgcggttacgcagcgtttccaccagctccagaccgttcattctcggcatagaaatgtcgcaaatcatcaggtccggatgcacctccgtcattttatgcagggcatccttgccatcttccgcctggaaggttgttgctcccagcgaggtcagccatccatgcaagagtgagcggaaaacgggttcgtcttcaactatcagaatctgttttcccgccaatggctgcgtcatgatatctcccctggctgacgataattcaatagtggcacgctattctcactatcgcctgtcagaatttgcttaagtcagtaactcgtacgtcaaacggctgtacgcactaagggtaataattcatccattttcttttctaccgccagttgccccgcggcaatcgcctctccggcgcgatgaaaatcaagcgtcgaaacttgcggacagtatggctgcaacaggatatccggcgggtcacccgccatacgattgcgtttaagacggttttccagtacctggatagaggtggtcatgatctccatcgccgtcggcgtcacggccgtacggcgggaactcattcgcgtcaagcgcgcgcgcagacgagtatgccatggcccctccttctcttccgcttcctgccgcggcgtttcaagggagaacaaatcctgctgcataagatgggcatcatgttgcaggtcgacggcaatcacaatatccgctcccattgcccgggtgagcgacacaggaaccggattgaccaccgcgccatcgaccagccagtaaccattatgccttactggcgacattaaccccggcatactgcaggaggcgcgaatggctaaatgtagatcgccttcggtaaaccacagctccctaccggtgcttaaattggtggcaacagcagcaaaccggcgctcgcagcgttcaatctcggtgacgggcataatgcggcggtaatgattgaatactttttccccccgcagcagtcccccccggcgccaggagagatccatcagcttcaggacatcccagttgctgaatgagcagacccatgattcgagtgccgggagtcggttacaggcatacgccgcccctaccagcgaaccgatagaacaaccggctacgatatcaatctcaataccggcccgctggagggcgttgatgacgccaatgtgcgaccatccgcgagcggctcccgcacctagcgccagaccaattttaagctttctcattagtactaataactatccttccactctgagcgtggcaacattgtcacggctcagttaacataatgccctttggcgtagaagcgccgttactctttcttccatggaggcagttttgtcgcaattatgcccctgtggcagcgcactggagtatagctcatgttgccagcgatatctgtccggcgctgagcttgcgccgggcccgtcacagcttatgcgctcccgttatagcgcgttcgtcatgaaagacgctgactatctaatcaaaacctggcatccgttctgtcaggcgcagcaatttcgcgccgaactggagaaagggttttcccagaccgaatggctgggcttaaccctgttcgccagtgatgaggggcgagctccaaatgaaggttttgtcagctttgtcgcccgctttaatgacaataaccgccctggcgccattattgaacgttccagattcttaaaagaaaatggacagtggtactatatcgacgggacacgaccgctgattggccgtaacgacccctgcccctgcggctcaggtaaaaaatttaaaaaatgctgcggccagtaacgctggcacagcgcttgcaaacattacaggattttcctcgcgatgcattcattacaacgtaaagtactacgcactatttgccctgatcagaaaggcctcatcgcgcgtatcaccaatatctgctacaagcatgaactcaacattgtgcagaacaatgagtttgttgaccaccgtaccggtcgtttctttatgcgcaccgaactggaaggcatttttaacgacgctactctgctggccgatctcgacagcgccctgcctgaaggctccatccgcgaactaaatccggcaggccgtcgccgggtggtgattctggtgacgaaagaggcgcactgtctgggcgatctgctgatgaaagccaactacggcgggctggatgtcgatattgccgcggttatcggcaaccatgacaccctgcgctcgttggtggagcgctttggtattccgtttgagctggtcagccatgaaggactgagccgcgaagaacacgatcagcggatgggcgatgctatcgccgcccacgaaccggattacgtggtgctggccaagtatatgcgcgtcctgacgccagaatttgtcgcccgcttcccgaacaaaatcatcaatatccaccattcgtttttgccggcgtttatcggcgcccgtccctatcatcaggcctatgagcgcggcgtgaaaatcattggcgctaccgcccactacgtgaatgacaatctggatgaaggcccgatcatcatgcaggacgtgattcacgtcgatcatacttataccgcagaagatatgatgcgcgctgggcgcgatgtcgaaaaaaacgtcttgagccgggcgctgtatcaggtactggcgcagcgcgtcttcgtttacggtaaccggacgattattctttaatcgactgagaaatgaattggttagctttacggcgttacgtgtaaaaatcaggcaaccagtttatttttgtcaaacgaatgctttacaggggcgcatcatttggtatgatgcgccccgcttcccgagaaggaagcaggccagtaccaagcattaccccgtggtggggttcccgagcggccaaagggagcagactgtaaatctgccgtcatcgacttcgaaggttcgaatccttcccccaccaccattattcactacagtgatatggtttccccgacaagcgtaaacgatgtttgcacttagcgggaagggtaagaaccttcgactaaggttcgactcgagcgccagcgagagaacgttgccgcaggcaacggcccgaagggcgaggagagatagcgacgagttatccttcccccaccaccattcattttgctgaatagcctacaatgtgattttacccctggtggggttcccgagcggccaaagggagcagactgtaaatctgccgtcatcgacttcgaaggttcgaatccttcccccaccaccatctccccatgccatgcccagcataatctacctacggtattctatattctgccctacagggaaggatgagaagcttcgactaaggttcgactcgagcgaagcgagagaacgttgccgcaggcaacggcccgaagggcgaggcgctttagcgccgagtaatccttcccccaccaccatctccccatgtcatgcccagcataatctacctacgatattctatattctgccccacggggaaggatgagaagcttcgaccaaggttcgactcgagcgaaacgagagaacgttgccgcaggcaacggcccgaagggcgaggcgctttagcgccgagtaatccttcccccaccaccatcttcttaaaaaacacctcaatccaattattctacgatattctatattctgccccacggggaaggatgagaagcttcgaccaaggttcgactcgagcgaagcgagagaacgttgccgcaggcaacggcccgaagggcgaagcgctttagcgccgagtaatccttcccccaccactgttgcactctcagccacctgttctgctgtctcatcgctcgcgcttcgcttagcgaggctacaagtggtgccgtctggtagcccggacaggtgcgcagcaccgcctccggaaaaactcacagcggtggcaaccgcctttttaccggcgagcttttcaccaccgaggtgttacactgcgcatactccgccagactgtccagcagggtatccagctgggcaatatcgcgcaccacgagacgcatcacaaaacaatcttccccggtcaccttgtcactttcaatacattccggcatcgcctggatatatttatccaccttctgcagcagcccaggcagcggacggacccgcaccagcgcctgcaggctatagcccagcgcggcgagatttacccgcgccccatagccctgaatgacaccccgctcctccaggcgcttcacccgctcggcggtgctcggcgaggtcagccccacccgcgcgctcaggaccttgagcgaaactctggcatcctgagtcaggcaggtgaggatcgcccggtcaatttcatcaagtacgtcattcatatatttcacctaattataaaaggcatttccccccttctaccttaattcagccatatcaccctgtcagggtttttcgcacaataactaaaaaatggtggaggtgaaaaatgcaacttacccgcggcgtctggcagatgagcctggcaatgataatctccggctcgatcggcgcgttcgtgctgctctctggtttgccggtgactgatgtggtgttctggcgctgcctgattggcgcgctaaccctgctggtgtttatcgtgttaagccgccagcccttcagccggctaacgcgtttcactctcgctctggcggtgattggcggcgcggcgctggtcgtcaactggctgctgctgtttgccgcctattcacggatctcaatcggtatggccaccgtggtctataacacccagccgtttatgctggtactgatggggatggtgctgggggaacgggtcagcgccgtgaaatggggatggttactgctggcctttggcggcctagtgatcctgctgtcgagcgagctgacgcctgcacacgaagaggggcttaccaccggcgtgttgctggcgctgggcgcggcattcttctatgccctgactgccatcatcgcgcgcaaactgcatccgctccccgcgcagcatatcgccttcatttaggttctcgtcggcgtcgtgatgctgctgccgctggtgcatgccccagaattgacggccagcttcccctggcgctatctgctgatcctcggcatcgtccataccgggatcatgtatcagcttttatatagcgcgatacagaaactgccgacgcccgttaccggttcgctctcctttatttatccgctggtggcgatggtggtcgactatctggtcttccaccatgcgttatccgcggtgcaattgctcggtgggatgcttattctgtttgccgccgcagggaataatctcggctggggcgaaaaaaaaccccgccgcggcggggtcagtgagcagtcgcgggccagttagcgacgggcgcggacaatctggtatttgcgcgtcaggtattcgaccggcgcgctccagatatgaaccagacgggagaacgggaacagcaggaacagggtcatgcccagcaccaggtgaacgcggaaaataaacgccacgccatccagatgctgtgacgcgccgccgtggaacgtcaccaccgactgcgcccagccgaccagtttcatcatttcactgccgtccatatgctgagcggagaacgggatcgtcagcaggccgagcgcacactgcaccatcagcaacgagaggatcagaatatccgctccggtggtggtggcgcgaacgcgcgggctgagcagacgacgcttgagcagcagtaacccgcccaccagggtcatcacgccgcaggcgccgccggcgatcatcgccatcttctgcttgacgtcgatcggcaggaaggactcatacatccagtgcggggtcagcatgccgaggaagtggccggcgaaaatacccaggatgccgatatggaacaggttcgacgccaggttcatccccttacggtccagcatctggctggaggcggcgcgccaggtgtactggccatagtcatagcgcaaccagctgccaatcaggaacaccgaacccgcaatgtacggataaatgtcaaagaagaacatattcaggaagtgcattattgctgtcctccgttagagatattcagatattgcggggccacggctccggcaaaacgacgctggtgagcggaaatttccgactcgccgcagccctggtcggcaaagaatttgacctgttcttcttcccagacggcgtccagcgcctgcggcgtatcgtcgcgcgcttcgtcggcaatcttctccgccaccttctggctgtcgacctgcgtattggccagcttcagcaatagctcgaacagcaccgcatagcgactttcgcgctgctgcaggcgcgcgctgagcagaccgaggatcggcgcgacgtcccgcaggccgccaagcgcttcctcttccggcagctgcgccagatactccagatatagcggcagatgatccggcagctcatggctatccagcagcagaccgtggcgctcgtactgcgccatcaggtcgaccatcgcctgcccgcgatcgcgggattcgccgtggacatgttcaaacagcagcagcgaggtggcccggccgcggtcaaacagttcgctataggccgcctgggcgtccagcggatcctgagccactaaatcgcgcaggaaaacgcccagcgcgtgggcatcctctttgctgagtttctctgatgacgcgagcgcctcgaacatctcctgctgatgctgccataaggcagcgtcaggatattcgagcagacgcgatacaatcacgagttcaatcatgcgtgcggctccgttttgctggtcacgtcgatggcgtcgatgcgacggctgttgaacaggttgaactgactgtcagagccgtggcagccatcgccaaagctaaagccgcagccgtttttctccggaaacgcttctcgcgcctgttcacgatggctgctcggcaccacgaaacgatcttcgtagttggcgatcgccagatagcgatacatttcctgggcctgcgcttcgctcagccccacctcttccagcgcgcgggtatcaacgacgccgtcaacggtttccgcacgcttatagtggcgcatcgccagcattcgtttcagcgccagcagtaccggctgggtatcgcccgcggtcagcaggttcgccagatattgcaccggaatacgcaggctttccacgtccggcaggatcccgttgctacccagttcacccgcatcggcggcggactgaatcggcgacagcggcggcacgtaccagaccattggcaaggtgcgatattccgggtgcagcggcagggccagcttccagtccatcgccattttgtaaaccggcgactgctgcgcagcttcaatgaccccctgcggtacgccatctttcagcgcctgctcgatcactttcggatcgttgggatcgaggaacacgtccagctgacgctgatacagatctttctcgttctcggtgctggcggcgttttcaatcgcgtccgcgtcgtatagcaggacaccgagataacggatacggcccacgcaggtttcggagcacaccgtcggcatcccggattcaatacgcgggtagcagaagatgcatttctcggatttcccgctcttccagttgaaatagatcttcttgtacggacagccggtgatacacatccgccagccgcggcacttgtcctggtcgatcaatacgatgccgtcttcttcacgcttatagatggcgccgctcgggcaggtcgcgacgcaggccgggttcaggcagtgctcgcacaggcgcggcagatacatcatgaaggtgttttcgaactggccgtacatcgccttctgcatgttgtcgaagttctgatctttggcgcgtttttcaaactcgccgccgaggatctcttcccagttcggaccgctggtgatcttgtccatccgctggccggtgatcagcgagcgcggacgggcgatcggctgatgtttgctctccggcgcgttatgcagattctggtagtcataatcaaacggctcgtagtaatcatcgatgcccggcagatgcgggttggcgaagattttacccaacagcatcgcgcgattgcccatgcgcggctgcagtttaccgttgattttgcggatccagccgcccttccatttttcctggttttcccagtcgttcgggaaaccgacgcccggcttactttccacgttgttgaaccaggcgtattccatcccttcccggctggtccagacgtttttacaggtcaccgagcaggtgtggcagccgatgcacttatcgagattcagcaccatgccgacttgtgaacgaattttcattttacgctctcctgtacctggtcgttgccttcgccgtctaaccagttaatgttcttcatcttacgtaccaccacaaactcatcgcggttggaaccgacggtgccgtagtagttaaagccataggccaggtgaccgtagccgccgatcatgtgggtcggtttcggcgtaatacgggtgacggagttatggatccccccgcgctgaccggtgatttcagagcccggcaggttcacgatacgttcctgcgcgtgatacatcatggtcatcccggctggaacgcgctgactcaccaccgcacgcgccgtcagggcgccgttggcgttgaagacttcgatccagtcgttatcttcgatacccagatctttcgcatccgcttcgctcatccagacaatcggcccaccgcgcgacagggtcagcatcagcagattatcgctgtaggtcgagtggataccccatttctggtgcggggtcaggaagttcagcgccttctccgggttgccgttggacttctcgcccatcaccgctttcaccgaacgggtgtcaatcggcggacgatagaccagcaggctttcgccaaagtcgcgcatccactgatgatcctgatacagcgattgacggccggacagcgtgcgccacgggatcagctcgtgaacgttggtgtaaccggcgttataggagacatgctcatcttccaggccagaccaggtcgggctggagataatcttccgcggctgcgcctgaatatcgcggaagcggatcttctcgtcttctttgttcagcgccaggtgcgtatgctcgcgaccggtgatctcgctcagcgcttgccacgctttcaccgccacctgaccgttggtttccggggccagggtgaggatcatttccgcggcgtcgatggccgtttccagcttcggctggcctttcgccgggccttccgccttggtgtagttgagcttacgcagcagatccatctcgctctgggtgttccaggcgatgcctttcccgccgttgccgatggtttccaacagcgggccgatcgaggtgaaacgctcgtaggtcgccgggtaatcacgctcaaccggaataatatgcggcgcggttttcccggggatgagatcgcattcgccttttttccagtctttgacatccagcggctgcgccatttccgcggcggagtcgtgctggatcggcagggttaccacgtcggtttctttaccgaggtggcccacgcacacttcagagaatttcttcgcgatacctttatagatctcccagtcgctcttcgattcccaggctggatcaacggcggccgacagcgggtgaataaacggatgcatatccgaggtattcatgtcgtctttttcgtaccaggtggcggtcggcagcacgatgtcggagtagagacaggtgctcgacagacggaaatcgagggtcaccaccagatccagtttgccgtcgaggccgttatcccgccattcgacttcttccggcttcacgccgccctgcttgcccaggtctttgccctgaatgccgttctcggtacccagcaggtacttgagcatgtattcatggcctttaccggaggagcccagcaggttggaacgccagataaacaggttacgcgggtggtttttgccattttccggctgctcggccgcaaagcgaatcgagccctctttcagcgacttcacggtgtaatccaccggggtcatgccggctttcttcgcttcgtcagcgatacgcagcgggttgacgccaagctgcggcgccgacggcagccagcccatccgctctgcgcgcacgttaaagtcgatcaggtggccgctgtaacgggatttatccgccatcggcgacagcagttcctgcgcggtcaccgtttcatagcgccactggctggagtggttatagaagtacgaggtactattcatgtgacgtgccggacgctgccagtcaagggcgaatgccagcggctgccagccggtctgcggacgcagtttttcctggcccacatagtgcgcccaaccgccgccgctctgaccgacgcagccgcagaagatcagcatattgatcaggccgcggtagttcatgtcgaggtgaaaccagtggttgaggcccgccccgacgataatcatcgaacgaccgtgagttttatcggcgttatcggcaaattcacgggcggtacggatgatatgcgcgcgggagacgccggtgatcttctccgcccacgccggggtgtaggctttcacttcatcgtagccggcggcgcagttgtcatcgttcagaccgcgctccaggccgtagttagccatggtcaggtcatacacggtggtgaccagggcggtagagccgtcggccagctgcaggcgtttagccggcagtttgtgcagcagaatgttttccagatcgactttgttaaagtgctcagacccttcgccgccgaagtacgggaagccgacgttcgccacttcatcatggctgcccagcaggctcagacgtagctcaatctcttcgccagttttaccgtcgcgctgttcgaggttccatttgcctttgtcgccccagcggaatccgagggaaccgttcggtacggtcatgtcgcccttctcgtcaaaggcgacggttttccattccggattgttctcctgaccaagggaatccacgaggtcggatgcgcgcagcgtacggccggcggcataataaccgtcgcgctcctcgagcatcaccagcatcggcatgtcggtatagcggcgcacatagtcggtgaaatactggctcggcttatcgaggtggaattcacgcagcatcacatggcccatcgccagcgccatcgcggcatcggtaccctgcttcggcgccagccacagatcgcagagtttggcgatttcggcgtagtccggagtgatggccacggttttggtccctttatagcggacttcggtaaagaagtgcgcatccggggtgcgggtctgcggcacgttggagccccaggcgatgatatagctggagttataccagtcggcggattccggcacatcggtctgctcgccccaggtcatcggcgaagccggaggcaggtcgcagtaccagtcgtagaagctcaggcaggtgccgccgatcagcgacagataacgggcgccggacgcgtaggagaccatcgacatcgccgggatcggcgagaagccagccacgcggtccggaccgtaggttttgacggtatagacgttggaggcggcaatcagctcattcacttcctgccaggaggaacgtacaaaaccgccgcgaccgcgggcctgtttgaagcttttagctttgtcggcgtcttcgataatcgacgcccatgcctcaaccggatcgctatgctgaactttcgcttcccgccacatcttcatgaggcgtttacgcatcagcgggtatttcaggcggttagcgctgtacaggtaccaggagtagctggcgccgcgcgggcaaccgcgtggttcgtggttcggcaggtccgggcgggtgcgcgggtagtcagtctgctgcgtttcccaggtcaccagaccgtttttgacataaatcttccagctgcatgagccggtgcagttgacaccgtgagtggaacgcacaattttgtcatgctgccaacgttgacggtatccatcctcccagtcccggttggtgtttagaagctggccgtgcccatcggcaaaggtttcacccttctgtttgaagtagcgaaaccggtccaggaatttactcatcgggtttctcctgatatggagcctgacggctctctgataaatcgacattgctggatttgcagcgaaggtaacgctatgaaagagggcgagaattgatagcgatcaatccgaactggcttgttactgcgcagcaaaacctcgattaccaccaaggtggtataagatgttattttttaacttgttgttttttaatgattttaacctcaaaaagcggcacctcaccgggatttgttaacaacggaggtattaaggggtagagccatttcactggcaagcccacctgttctggctcagcggtcgatgcggacaatatcctccgttagtatgttgtaactaattgagcggttaaaaaaggcgcctccgtggggagcgcgcctttttatacgccaacgttaccgcggccgattactgacgcttacgaccgtataccgcccaggtgatcaccacgcaggcaatatagaacacgaggaacactttcatcgccccggccggcgagccggtcagatccagcgagataccgaacgctttcggaataaagaagccgccgatagcgccaatggcggagataaagcccagcgccgccgcggtatcggtcgccgcctcgcgcatcgcctgcgcttcgctgccgccctgggccttcacgcggtccatagtcagcttacggaagatcacggagatcatctggaaggtggaggcgctccccagcccggcggtcaggaacagcaccataaacaccgcgaagaaggcgataaagttaccgccctggccgttggtcggcagggtcaggaacagcagcgcgcagaagacagccatcaccacaaagttgaccagcgttacgcgggtcccaccgaggcggtcggagatcgccccgcccatcgaacgcgccagcgcgccaatgaacgggccgaagaaggcgtaatgcaggatctgcacatccgggaactgagtttttgacagcatcgcgaacccggcggaaaagccgataaaggagccgaaggtcgcgagatagagcagcgccataatccacagatgcaggcgcttaagtaccggcaactgctcgctcagcgacgctttcgaagccgacaggtcgttcataaagaaccacgccgccagagtgaaaataatcaggaaaggtacccagatccacgcggcgttttccagatacagcatcgagccgtccggttgctcgctaccgttaccgccaaaaacggcaaagatagagatcgagaccaccagcggcgcgaccagctgcatcacgctgacgcccatattgccaagtccgccgttaacgccgagcgccccgccctgcttcgctttcgggaagaagaagctgatgttggccatactggaggcaaagttggctccggcgaagccgcacagcagagagataatcacgaagatgctaaacggcgtagaggtatcctggaccgcgaagcccagccagacgcatggcacaatcatgatcccggtgctgaacgccgtccagcgacggccgccgaacagcggcaccataaaggcgtaaggcacgcgtaataaggcgcctgacagcgccggcagcgcggtcagcataaacagctgatcggttgtaaactgaaagcctactttgttgaggttaacggcaaccgcgctgaacaacatccaaacgcagaacgccagtaacagacagggaacggagatccataaattgcggcttgccacacgatggccgcgctgttgccagaattcaggatcttcaggccgccagtcggttatgaccgagcggttagccttctccgggagggaagattgactcatagatacctctgattattcatatttcctgccgctaccttaggggttacccggggcggtaagttgatataaatcaaaggaaaagcgcgagctaatttgtgcaaaaataaaccatgcctccaagtgagtagagaatgatggggaaaaaagtgtggtttttcacgctgctgccgggttgcgtataatcccccccctaacatcgcctaccaccgacaattaaggagtaactctttgggggtatgggtatactccaggggatagtcgagaataagcgccactcccggagacatgaccggtcaggagccacgcattccatgttaaaacgtctttttaccccgctgacgctggtcaatcaactggcgttaatcgtgctgctcgccacgattattggcgtcgccggcatggcgatctccgcgcgcctggtgaacggcgtgcagggcagcgcgcacgccattaacaaggccggttcattgcgtatgcaaagctaccggctgctggcggcgatcccgctgaatgaaaacgatcaaaaactggtggcggacatgaccgccaccgtcttcagcccggagctgcaaaattccgcccgccgcgacggccaggaaatccagcttaaagccctgcagcagtactggcagctggcgctggcccccgggatgcagcgcgcagtcaatcaggcggaagtggcccaggatgtcgccgactttgtcgatcgtatcgaccagttggtcaccgcattcgaccacaccaccgagcagcgtatcgaacgggtggtctggatctatcgcatcctcgccattggtatggcgctgctgctgatcttcactatcatctggctacgcgcccgcctgctgcggccgtggaaacagctgctgagcatggcgcgcgcggtgagccagcgtgatttcacccagcgggcgcacatcagcggccgcaacgaaatggcgaccctgggcatggcgttgaataacatgtcggaagagctggcggaaagctatgccgtgctcgagcggcgggtgcaggagaagactgccggactggagcagaagaacgagatcctcgctttcttatggcaggccaaccgccggctgcactccagcgccccgctctgcgaacgtatttcgccggtactgaatggcctgcaggggctgacgctgctgcgcgatatcgaggtacgggtttacgacctggaagacgaagataatcaccaggagtttacctgccactcggatgatgactgtgatgataaaggctgctacctctgtccacgcaatctgccgccgctgccggatggcggaacaacgctgaagtggcggctgtcggatgcgcatagtcagtacggcatcctgttggcgacgctgccggttggccgccatctcagccacgatcagcagcagctggtggataccctggtggaacagctgaccagcaccctggcgctggaccgccatcaggagaagcagcagcagctgatcgtcatggaagaacgggccactatcgcccgcgagctgcacgactccatcgcccagtcgctatcctgtatgaagatgcaggttagctgtctgcagatgcaaggcgacgccctgccgacggagagccgccagctgctggggcagatccgtaacgaactgaatacctcgtgggcccagctgcgggagctgttaaccaccttccgcctgcagttgaccgagccggggctgcgcccggcgctggaggccagctgtcaggagtacagcgcccacttcggctttacggtgcagcttgattaccagctcccgccgcgctttgtgccctcgcatcaggcgatccacctgctgcagatcgctcgcgaagcgttgagcaacgctctgaagcatgccagcgcgaccgaagtgaccgtgacggtgtcacaacgcgataatcaggttcgtctggtggtagcggataacggccgcggcgtaccggaccacgccgaacggagtaaccattacggtttaattattatgcgggatcgcgcccagagcttgcgcggtgactgtcaggtacgacgccgggaaaccggtggaaccgaagtgatcgtcacgtttatcccggaaaaaacgttttccatccaataaggagaccctcatgagtcaacaggaacgggcaactatccttctcattgacgaccatccgatgctgcgcaccggcgtgaaacagttgatcagcatggcgccggacatccaggtgattggcgaggccagcaatggcgcgcaaggtattgagctggccgagtcgctggatcctgacctgatcctgctggaccttaatatgccgggcatgaacggtctggagacgctggataagctgcgtgagaaatccctttctggccgggtagtggtcttcagcgtctccaaccatgaagaggacgttgtcaccgccctgaagcgcggcgccgatggctatttgttgaaggacatggaaccggaagatctgctgaaagcgctgcagcaggcggccgccggagagatggtattaagcgaagcgttaacgccggtgctggccgccagcctgcgcgccaaccgcgccacctccgatcgcgacatcagccagctgaccccgcgcgagcgcgacattctcaagctgatagcccagggactgccgaacaaaatgatcgcccgtcgcctggatatcaccgaaagcaccgtcaaagtacacgtaaagcacatgctgaagaaaatgaagctcaaatcccgcgtggaagcggcggtatgggtccaccaggagcgaatcttctaaggcgagtccgtccaggagacgcctggcgtggtaaacttgaccagcggctcggtcagcgccagggcgatctcattggaggagacgcgctgcccctgtttatcctccaccaccaccgacaggcgccagcggttcgcggcgcccggttcactgttccacaccggcataatgatgctccagccatcggggctgctggcatctaccggcggcgtcaggctgagggcctgggtgtctccctgccagtgcagcgccttgatgccatgcagactatggatctgcagcttcaactgcaccgtctccccggactgcagatcccagggcggcgtggccagatagaccgtcagatttttgcgctgacgatactccaccaccggcagattatcccgctccggactatcgaagcggctcccgcgcagcgagttgctgatcgccacctcgtctgccgcaagctgctgcttaaggggtacgccaaagcgatagtttagcttcagtcccacattgttctggctgacgccattttccccctgcttatgcttagcggtcaccgtgaccagcgggaccggggtgtaattgagcccaacggagacggccaccggattatggtagccggtgccggagtgaaacagatcgacgctatcgccgaaatactgttcgacgctgacgctggtgttgatgtgctggtagaacggcagccgcgcctgggcggtgacgtcataccctgcggccatccgctgctcctgagtctgattatcgcgtagctgccagtcgcccagcggatggtaatagtttgccgacaggcggagatattctccccacgcttcggcgccaacgctgccgcgcgccaggctttcgctcagaactttatcgtaaaacgagttatagcccagcagccaaccgccgacccgccaacgctggccaagcccgatgttgcccaccagatcgtgctcgcgccgggtcaccgagtactggttccacgtcagataacggtcgttatcctgcaacggcacgaaccagctccctttactgccggtgaatttcccctctttatcgaccagcaggtcgacattggcgttgccccacggcgagagccaactctccagctgatgactcacttcattgccgattttactgatggcaaacagctgcgcctgttcacccgccgtcagaccattgtcgctcatgctggcctcgccaaacttcttcgccacttcggcaaagtgccgggcgtcgtcatcaacctggggagcaatccccatatcgggcagcggatcttgcgcttgcgcagggcgggtggtgtcgctggcggtcagcgcccagacgggaacgcccggcaacagcaggagaaaggtcaacgttggcaacaaacggaacgacacaggcattaacagagtttgcgcaagctcacaaaaatggatagaagtgttagtttatcgttttttccctgctcccgcagccctgtgggcaattccaggaataagctgaaaccggttgggtaaggtgccgcccaaccggaggcgtcgctgcgcgccaccgttacgcccgggttcgttgcgccgccagcagcgcgttgagctccggcacgcaagagccgcagttggtcccgcatttcagcttcccacccagcgccccgacgctggcgcagccgctggcgatggcctcgttaattgaccattcccccaccccaaagcagctgcagacgatccgcccccgcggcgcgactgcggcgcccggtcggccgctaagcaaggcatgtcgttgggcagcatcggacggcggcgcggcaaaggcagcgcttatccatgcgcaatccaccgccggctcgcgcgcatcgctccaccagccgagcatcagccttccctgatgccaggccagcaggttccacaccgcgccgccgtcagccacctgtaactgccagccgcgccgggcgcaccacgcgctgagccactgtcgggcagatgcctccccggccagcgagtagtgcagcacgcctggcgtcgcccgccgccgccagtgccaggccgcaggaaatggtagcggttcgcggcaaaaaagctcgctgtgccaggccggttgccaggcggcaatcgccaccgccgcctgtttactttccggctggccggaatacgggtccgtgacggcggccagcaggttattcacccgcccctgacgggcaaactggttgttccagtgcatcggaacaaacagcgagccggggcgctgcccttcgctgatcgccactttcgccaccatcaccccatgccgcgaccagatccgcgccagcccgtcagcgggaagctgatagcgaacggcatcctgcggcgccacctccaccattggctccgcgatatgctgcatcagccgcggcactgcgccggtacgggtcatggtgtgccactgatcgcggatccgcccgctgttgaggatcagcggataaaaggcatcggttgtcgcccgggtcggttgaggcgtcaccggcaccatccgcagcctgccatcgccatgccagccgcgcgtgatatcccaggcgacctcgctgcggctgaccggccagcgcaccggcggcatggcgtcccacgcctcacggctgagatccgccagcgcgccgatatcaaacgcccgctggccgtcgttttcgaaaccggacagcgccgcatgctcgcggaagacgtcatgcggatgctgccaggcaaacgcctcgcgataccccagcgcctggcccactctggcgatgatccaccagtccgctttcgcctcccccggcggcggcagaaagctgcgctgacgggatatccgccgctccgagttggtgaccgtgccattcttctcgccccaggccagcgctggaaagcggatgtgggcgaaacgtccggtatcggtctgggcggcgacatctgagacgatcaccagcggacaggcggccagcgcctggctcaccgcgtggctgtcagggagcgacaccaccgggttggtacccatgatccagaccgctttgacctcgccgcggccaatggcggcaaacagctccacggcggtcagcccgggggtctgcgccagccgttccgtcccccagaagcgggccagccgctgcagatcgtctggcacaaaatccatgtgcgccgccagcatcgtcgccagcccgccgacttcgcggccgcccatggcgttgggttgaccggtcagcgaaaaggggccgcagccgcggcggccatacttcccgctggccagatggacgttgatgatggcgttacatttgtcgctgccgctggcggattgattgattcccatggtgtagagggtgatcgcccgcggggcggcgatgaactcgcgatagaatcccgccacctcatcggcaggcagaccgcaaaaggacgccaccctcgccacgtcccagccgcgggcggcggccagcgcctgcgggccgtcgcgaaagccatcgacgcaggctcctgcctcagccagggcgttaagcagccccgcaaacaacccgccgtcgcttcccggggccagcgccagatggcggtcggcgatctcgcaggtagcggtgcgtcgggggtcgatcgccacgatccgcaatcggggattatcccgcttcgcctgcgccagccgctggaacagcaccggatgcgcccaggcggcgttcgagccgaccagcaccaccagatcgctgttttccacatcatcgtagctgcagggcaccacgtcggcgccaaaggcccgcttgtagccagtgaccgctgacgacatgcacagccgtgaattggtatcgatgttcgccgcgccgataaaccctttcatcagcttattggcggcatagtaatcctccgttaacagctggccggaggcgtaaaaggccaccgcttgcggtccgtgctggtcgatgatctgtctcaggcgcgcagcggtttccgccagcgcctgaggccaggctacctgctggccgtcgacctccggcgtcagcagccgccccgccaggcccgtggtctcccctaaggcggcccctttgacgcacagacggccgaggttcgccgggtgctgatcgtcgccgcgcacgctcacctgccccgcgtcgtccacgctcgccagcaccccgcagcctacgccgcagtaggggcaggtcgttcggatggtcttcatcaggaggcctccgcgcgggccagcagctgctggttgcccacccacactttgccgttttccactttcaccggccaggcgcgtaccgcctgttcactgccgtcgcacggccagccgtcgcgcaggcgtatccgctgtttgtacagcggggagatcaccaccggctcgccgccgacgtcccctaacagcccacgcgacagcacgttggccgcgctgcccggctcgcggttgtcgagggcgtagacccgctcgccgaagcggaacagggcaatctgccgctcccctaagcgggcgccgatccccgcctgcgccggaatggcgtcaaggtcgcataccgcctgccacggtcgggatgggagttcgccttcgggcaacgtctcagtcagcagcggctgcggctgaccgcgcagatcgcggcgctgcacagcctcgtcgggctggtcgctattaacgaaggagcggaacagcgccagacgctgcggatcgttgagggtggtctgccactcgcactggtagctgtcgacgatccgggccatctcctgctccagctcctcgccaatgccaagactatcctccagcaccacctgccgcagataggtgacgccgccctccaggttatccatccaggtgctggttcgctgcaggcgatcggcggtacggatatagaacatcagcagacgatcgatgctgcggatcagcgtcgcttcgtcgagatcgctggcaaacaggtcggcgtgacgcggtttcatcccgccgttgccgcagacgtacagattccagcctttgtcggtggcaatcaccccgatatctttcccctgggcttcagcgcattcgcgggtgcagccggagaccgccatcttgattttgtgcggggcgcgtagccctttatagcgatgctcgagccgtaccgcgagcccggtggagtcttgcacgccgtagcgacaccaggttgagccgacgcaggatttcaccgtgcgcagcgacttgccgtaggcgtggccggtttcaaacccggcgtcggccagctcgcgccagatagccggcagctgttccagccgcgcgccaaacaggtcgatgcgctggccgccggtcactttgctgtagagctggtaacgtttggcgatctgcccgatggcgatcagtccgtccggcgtcacttcccctgccgccatccgcggcaccaccgaatagctcccgtccttctggatattggcgaaatagcggtcgttggtatcctgcagcggcaggtgcgccggcttcagcaggtactcgttccagcaggaggccagcaccgaggccaccagcggtttgcagacatcgcagccgtgcccctggccgtagcggctaatcaactgctcgaaggtatggatatggttaacccgtaccagatggtagatctcctggcgcgaccacgggaaatgttcgcagacgtcttttttcacttcgacgccctgctccgccagctgatactccatcacctgtttcaccagcgcgctgcagccgccgcagccggtagccgctctggtgcagctttttatcgccgacatatcccccgccccattgttcaccgcctggcagatatcgcctttgctgacgttatggcaggagcagatcggcgcgctgtccggcagcgccgcgacgccgagcgccttcggcgcggctccctccagcgcgggcaggatcagactctccggacgcggcggcagcgccatgccgttcagcatcatctgcagcagcgtggcatagtcgctggcatcccccaccagcacgccgccaagcagggctttgccgtcctgactgacgacgatttttttgtaaatctgctgcggaccgtcggtccattgatagctctgacagcccggcgtgcgcccctgcgcatcgccaaacgaggccacgtcgacccccagcagcttcagtttggtgctcatgtcggcgccgctaaagcaggcgtcctctcctgcgagagtggccgcggcgatgcgcgccatctgatagcccggcgccaccagaccgtaaattttattgtcccacagggcgcattcgcctatcgccagcacgttcgggtcagaggtgcggcactggtcgtcgatgtgaattcccccgcgttcgcccacctgcagcgcgcagccgcgggccagcgcgtcctgcgggcggatccccgccgagaagaccaccatgtcggtccgcaacgcgccgccgtcggcaaagttcagccgcaggccgtcggcctcgcgcacgatggcggtggtcgctttgctggtatgcacccccacgccgagggcgacgatcttctcccggagcatcgccgccccgccgttatccagctggacggccatcaggttcggggcaaactccaccacctgcgtctccagccccagctgtttcagggcgttggccgcctccagcccgagcagcccgccgccgataaccaccccgctcttcgccgcggcggcatgggcggcgatacggtcgagatcgtcaagagtgcggtagacaaagcaccccgcgagatcgttaccggggattggcggaacaaagggatacgagccggtcgccagcaccagtttatcccagtggatttcatgcccctcggcgtcccgtaccagccgtgcgtcgcggtcgatggtcgccaccgcctcgccgaggcggagttcaataccatgttcaataaagaagtccccggccgccagcgacagcgactcggcgctgcgtccggcaaaatactcggagagatgtacccggtcgtaggcgggataacgctcttcgccaaacaccacgattcgatattgctgatgcagattgcggctcacgcattgctcgagaaaatggtggccgaccatgccatgtcccaccagcactaatacaggtttcgtcatcgtcattattcctgcagcctgcggctgcgttgaagaggggtcaaaaagccagtccacggtggcaggctcatcgctttccaggcgcgcggtaagcgcggcggcggcggtgcagtcgcccatcagcagcacgccgcgcaggcggccatcgcgcagcagcaggcgacgatagtggcggtcgatggggtcccagctggtataaatgtcatcctgttcgccgggctgctgctcgccagcgctaaagagttcaatgccggtgaccttcaggcgggtcccggcatcctgccagacaaagccctcgccgggggcgccgcacaggcgatccgccagcacctcggcctgacgcaggcagggagccaccagcccccaggtctggccgtcaatttcgcaacattcgccgatggcgctgatccccggcagcgaggaggccatctgacggtcgaccacgatcccccgctggcacagcacgccggactgcgccgccagacggctgtcaggctgcacgccggtagccagcaccactctggcggcgcggaatacgcgcccgtccgccagccgcacgccatcggcgtcgatggcggcgatgcggcactccagcacgcagcgaatgccgcgcgcttcaagctgctgcctgagctcatcggcggcaaaagcgtcggtcagcggcgccattaatccgctgccgcgatgcagaagagtgacctctccgccgtgacgacgcagcgccgccgccgcttccacccccagcaccccgccgccaatcaccaccgccgggccgggtatcgccagaatacgttccacgtccgccagggtgcggaagggcataacctgcggacgatcaatgcccggcagcggcgggataaagggccgcgaaccggtggcgaacaccagttcatcccacggcagccaggtttccgcgatgcgcagccgccgttgctgaatatcgacttcatcgaccgcctcgccagaccgcaggcacaccccgtgccgggtataccactccgccggcagcaacgggatctgcgccgccgttttttcacctgccagcagcggcgagagctgaatgcggttataggccgggtgcggctcgtcgccgacgacggtaatggcaaaccgcgcggggtcgcgctcaaccagccgctgcaccagccgggtggccgccatgccgttaccgatcaccaccagtcgccgcgtcatgaccgcctccttacgccgctttcggctgtttttcatacaggaaatggaggatctgctggcgcagatggtgataccggctgtcgtccgccagctgaacgcggtggcgcggacgcggcagatcgaccgcgaggatctcgccgaccgtcgccgccggaccgttggtcatcatcagcacccgatccgagagcagcaccgcttcatcaacgtcgtgggtgatcatgacgatggtggtattgagctcctgctggatatgcatcaccgtgtcctggaggtgggcgcgggtcagcgcatccagggcgccgaagggctcatcaagcagcaacactttcggcttcatcgccagcgcccgggcgatacccacccgctgcttcatgccgccggagatctccccgggacgtttgtgcagcgcatgacccatctgtacgcgcgccaggttgtgttcgatccactcccggcgctcactcttgctcatggtgcgacggaacacctgatccaccgccagcgccacattgtcgaaacagctcagccacggcagcagcgagtggttctggaaaaccaccgcccgctccggcccgggaccggcgatttcccggttatcacacagtagtccgccctcggtaggggtggtgatcccggcgatcaggttcagcagggtcgattttccgcaacccgagtggccgatcaggctaatggtctccccttcgacgatatcgaaggagacattctgcagcgccaggaactcgccgctggcggtgttgaagcgttggctgacggcctgcacctgaattaatggtttcatgttggctccttatttttcctgccagctaaagcggcgagcgagcagcatcaggccctgctccagcagcaggccgacgacgccgataatgacgatggcgatgatgatgttttccacattgaggttgttccactcgttccagatccagaagccgatccccagtccgccggtgagcatttccgccgccacgatcaccagccaggcgatgccgatggagaggcgcacgccggtaagcaccgccggcagcaccgccggaaagaggattttgcgcatcaccgtccactccgagagctggaggacgcgggcgacgttgagatagtcctgcgggatccgccgcacaccctccgcggtgttgatcaccatcggccagatggagcagataaaaatggtccagctggaagccggctccgccttctggaacagcagcaggccaatcggcagccaggccagcgggctgaccgggcgcagcagagcaatcagcggattaaacatgcgggcgaagaacagcgaacggccgatcaaaaaccccagcggaatgcccgccagcgccgccaggccgaagcccaccgccacgcgctgcagggaggccagcacgttccagccgatgcccatgtcattgggcccgtcctgatagaacggatcggcaaacagggtcagcgccgagtccagcgtgctcagcggcgtgggaaagcctttgctatgcatcgccgccagctgccaggccagcagcagcacacccagccccaacagcgggggcagcaggcgctgggtgagctcacgcagccagcgcgtgacggccggcgtggtgcgccggacctgcaccggcggcaggataatcacttcgccaggcgcgttgtccacgctgacgaccggttgcttacgttgtgcctgcttcatctcatgcccccttacgttgaatagagaaatggcgggcgtagccttccgggtcggacccgttccataccgtcccgtccattagtgtgctgctgcgcatcctggctgccggcgcgctgatccctcctaccgcctgggcggcagcctgccagacatcgatgcggttaatgcgcgacgccaccgcgaggtaatccggagcctgcttcagcaacccccagcggcggaactgggtgaggaaccacatcccgtccgacagccacgggaaactcacctcgcccccggcccagaagcgcatcggatgggcatcctgccagcggcggccaaggccgttgtcatactctcccagcatccggccggtgaggtattgctccttggtattgagccagccgcgtctggcgagcaggcgggccgtctcccgggtgttctccggcgaggcggcgatccagcgctgcgcctccatcagggccgccaccagcgcgcgggcggtgttcgggttgcgttccacccagtcgcgacgggtgcccagcaccttttccggatgctcgggccagatatcctgggaagtggccgcggtgaagccgatacggtcgttaatagcgcgggcgttccacggctcgccgacacaaaagccgctcatattgccgatgcgcatgttcatcaccatctgcggcggcggcaccacgacggtgcgcacatcgttgaagggatcgatgccggcgctcgccagccagtagtaaagccacatggcatgggtgccggtaggaaaggtatgggcgaaggtgtaactgcccggcgcgctgcggtcgatcagccgcttcagcccgccgaggtcggtcccccctttctcctgcagctcgctggagagggtaatcgcctggccattgcggttgagggtcatcaaattggccatcgcctgcggcttgctggcgatccccagttcgaggccgtacagcaggccatagagaatatgcgccgcgtcgagctcgccggccaccagcttgtcgcgcaccgccgcccagctggcttccttactcgccaccagggtgatgccatatttttggtcaaaccccttcgccgcggcgatggccagcggcgcgcaatcggtcagcggaataaatccgacccgcacgcgggtttgctccggtttgtccgagccgccggcccaggcggcctgcatcacgcccggcagcagcatcgcgccgcccagcgcggcccctgcctgcagcaagcgccgccgggaaattgaaaatttgtcgcccatatccgctccaccatgcgcaaaaaaaaagcgcccgacagtgcatacgcactgcaggacgcctttatccacggacacccgaaccgccattggttcgttgcccggacttttattcacttaataagtaatgcaaacgggatgccagctttggcaatagcgcgctggcgggctttttcccaacgctggccggtttttcacctaaaagtgcaccgccggcaggcaaagaatgcccatcgattgtgcatctactcctttggtgttagcggccaaatcgccttcaccatcagcagcgcgcgggctatctcaaccatgcgctgatttttgtccatggccatcttgcgcagcgtctgccaggcctgctcctcctgcattccctggtgcgtcatcagcagacttttcgctttttcgatcagcttgcgctcttcgagcgcgtctttcagcgaggccagctggctggagagctgctgcagctcataggcctgctggcgcaccagcggcagtagctgtttatcgagccgtggcgtcacgctatcgtcttcctctccggcctgccagccaggcgcgtcgtctgctaacagcgcgtcggtggcatccagcagatcgtcgatcagttgctcttccacttcgcgcagttgctcaagccgttgggtttgcaggccaaaccagcgcagcgccgtttccccgccgtcggcagccggctggcgggtacaggcgatccgccgcagctgttcaatatccagaccggcgtggcactgggttctgaacaactggacggtcgccgggctgcccagcgcctgaaagctgtcgaagcagggctgctgaccgtcaatacggtccaccagctgctggcgcaggctgtcgctgaactcgccgcgggtaaagcccaatgctcccagcgcgcgctcctggcccaccagctcttttccctgcataaagctgtacagggcgaccatccgaccagccaccggcggatcgtcaatgctgtcattgagctgcggggcgatgttcagcagatggcggatgacgcggctgaactgctccgtcgcggcttcagcggcaatttgccggcggccgatctgcgcgcgtagcgccgggagctgcgccagctcgtcaaccgctctggcgatacgccagcacagcgcgctgccggctaccgcgcgcgcccgttcgaggctggcataaaacagggctagccgctcgtcaaccagcgcccctcccgcccgacactccgctgtatacagcaagccgcccgagcaaagatagatattcgacgccccgcgctcacactgcagcatatgcaccagcgcgctgagctggctggccagttcccccagttggctaagctgctgaagctgttgtttttgcaggcgacgcgccagctgcagccaggccgtcgcatcgtgcgcatgaccagtcgtattattcatacccctcctccgggttaacgctttatactgcctaaagcaataaccgtgcctttaagaaggagtttgtatgcaacgtattgtgatcatcgccaacggcgccgcctacggcagcgaatccctgttcaacagcctgcgcctggccattgccctgcgcgagcagcagtccgacctcgatctcaagctgtttctgatgtccgacgccgtcaccgccgggctgcgggggcagaagccggcagaagggtataatgtgcagcagatgctggagatcctcaccgcccagcaggttcccgtgaagctgtgtaaaacctgcgcggacggccgcggggtcagcgcactgccgctggttgacggcgtggaggttggcactctcgttgagctggcccagtggaccctggcggcagataaagtgctgaccttctgaatctggggcgccaaacggcaggaaatatcaggtttcgccgcctgcagaggtaaaaaaaacgttagctgaatgctttcaggaacaacgtcatttttgtttaatctttatccctttttttgatcaaaatcagcatcccgacccgcgccgtttggtgtgatgcacagagcaaagtgtgaacaatatcacgcgaggactgggtgggcaggatgctgtagcgggacagaaacggggtataaaatggcgatggttaaagcaagtttgacgttatttggtggtgacacgctggtggtgcggtgctcagagcgctgccatattcatctgatgagcgcgaaggtcccgggcgacagtcatgcggatattctgagcgtgcaggatcgggacagcgcgtatctgacggtgccctacagcggcacctggaacgtgcttatcgacagtcacagccagtcgctggagcactccatcagctacgtgccggcctgaccgtcactgccagaacacacgcccggtcatgccgggcgtgagattcatgacaaacctcatgcaatcattgtacttgcagattgcaccagaaaaataacaaggaaaatcaatttattgattttcggctgataaccaccagtaaggaaaaatcacgctttttccttactggtcagcaatcggacgcccggtcatgccgggcgttttcttttgcgcgcgctcaggccaggcccggcgtcggactctcgcccaacagcgcgcggacgctggccaccaggtcatcgagactggcatcgtgcatgcccagcttgcgcagcgcctgctcaagcgaaaacagatactgggcgttggtgccgagcggcccgctggcccgggcgatcagcggggcgataacctgggcactggtatccggttcaaacagtggatggcgcggatccataataaacaccagggcattcaccgtccgtccgtcgtccagctccagcttgcaccaggtgggcagatagcagccggtgatcatctcccgcttccacagcagggtcagctcctcctccagcgtgtcgtcaggcagacgataggcgacgccggtggttcggccgccctctttgagagccagcatgcgtcccggctggcaggcactaccgcgcccggcggtcaaccgcaggcaaaacgcgcggtgccagcccggcagcgtgccggtgcaggactcgcgataattgagcgccgggttccagataagcgaaccgtagccaaagatccatactgagccatcatccgggcggcaggccagcgtcgccgccagcgaggctgcacgttgttctgccgaccagagtagcgattcctcaatagcgccaaacgctgtcttacaatccgcattcattaagaaatcacgagttaacactgtttactacctccgccactgcccgcttcccggcgttcgtctcatgcatccgtcaatattgctgaaatattatccagctttatctttcaataagcaatcagcggggcgctggcaagcgaaaaagcggcgtcagcgattattttttcttatgccacttatcatcatcgcctttctcatagctgttcttcaccgccgcccaggcgactttgtgcgccgtctcttcgcggctggcgtcatcgcgccgctcgtctttatctttatattgatcccaggcgctgttaaacgcttctttataaatttcctgcgcatgggcaggcagtacatgctgaacgctgtcggggagttcttgtttactgcgatagggcatactgacctcctgtttgagcattaagtttaagcctggtacgcattcggctggctatcaaggtcaaaatgagtagaaaaattattttagtaattatttgaataataagaactaaatataagtaaacataaattataataaactaatcaagatatccatcgatacccgtaaatttaagtaaaaaaccagcggtaatttagcaagatctgttactttaccgccctacgtttttataattataacacctgcataaatggagatggttcatgacccatgcacatgaggcggtaaaaacccgccataaggagtcttccctcgtctttccggtgctggcgctggcggtgctgtttttctggggcagcagccagtcactgccagtggttatcgcgatcaatatcctcgcactggtcggcattttgagcagcgccttcagcgtggtccgccacgccgacgtcctcgcccaccgcctgggcgaaccctatggctccctgattttaagcctgtcggtggttatccttgaggtcagtttgatctctgccttaatggccaccggcgacgccgcgccgaccttgatgcgggataccctctactccattattatgatcgtcaccggcggtctggtcggtttctctctgctgctgggcgggcgtaaattcgccacccaatatatgaatctgttcggcattaagcagtatcttatcgccctgtttccgctagcgattatcgtgctggtctttccgatggcgctgccgggcgcgaacttcagcaccgggcaatcgctgctggtggcggtaatttcggcggccatgtacggcgttttcctgcttattcagaccaaaacccatcagagcctgtttgtttatgagcatgaagacgacagcgacgatgacgacccgcaccacggtaaaccgtccgcccacagcagcgggtggcataccgcctggctgctggtgcacctggtggcagtgatcgcggttaccaaaatgaacgctaacccgctggaaacgctgttgaccagcatgaatgccccggtggcctttaccggcttcctggtggctctgctgatcctgtcaccggaaggccttggcgccctgaaagcggtgctcaacaatcaggttcagcgggcgatgaatctgtttttcggctcagtgctggccaccatctcgctgacggtcccggtggtcaccctcatcgccttcctgaccggcaatgagctgcgctttggccttggcgccccggagatggtggtgatggtcgcctcgctggtgctgtgccatatctccttctctaccggacgcaccaatgtgctgaacggcgcggcccacatggcgctgttcgccgcctatctgatgaccattttcgcctgaccccgctttcccacccggcggagtccgggcgaaaaaaagcctgccggttttgacgccggcaggcttttttactgatgcagtcaggcttacttgctggtatccagctcgtcgaagcttttcaccagatcgtcaatcgctttcatctgtttgaggaacggctccagtttatccagcggcagcgcggacgggccgtcgcatttcgcgtggtccggatccggatgcgcttcaataaacagaccggcgatacctaccgccataccggcgcgggccagctcgctcacctgcgcacgacgaccgccggaggctgcgccaaacgggtcgcggcactgcagcgcgtgggtgacgtcgaaaatgaccggcgagttgttggaggctttcttcatcacgccgaagccgagcatatccacgaccaggttgtcgtaaccgaagttagcgccgcggtcgcagaggattactttgtcgttacccccttcgataaacttatcgacgatgttgcccatctgacccgggctgacgaactgcggcttcttgacgttgatcaccgccccggtcttcgccatcgcttccaccaggtcagtctggcgcgcgaggaaagccggaagctggatcacgtccaccacgtcagctaccggctgcgcctggctggcttcatgaacgtcggtgatgattttcacgccaaaggtctgcttcagctcctggaaaatcttcatcccttcttccagacccggcccacgataggagtggatggaggaacggttggctttatcaaaggaggctttgaagacgtagggaataccaagcttctgcgtaacggtgacataatgttcgcagatacgcatcgccaggtcgcgcgactccagcacgttcatcccgccgaacagcacgaacggcaggtcgttcgctacgttgatatcaccaatgctaaccactttttgtttcataagttcgccttatcagggtgtaaccggaatggttccagactaatgcaatgtaatttgtttatgcgaaatcgtgttgatctgcgcgcggatcatctcgctgatcggatcctccgggcactgctcaacgaaatagctcagatccaacagcgccacgtgatcgcagtccagctgggcgtatatcagcccgcggtcgcggatctcatacggatcttccggattaaactgcagcagcgcttcgctggcgcgcagggccagctccatctgccgctcttccatcagcgccgacttcagggtgtccagcagcttgcggatcacctcggcgttatccgcttcgtcgagatcttcattaaacagttccgccaccggcccgatgttgcccttcagccatacctccagggtatgctcgtcgagggtctcgccgttaaacggattaatcagccacatctcttcgctggtttccgggtccgcacgcagcagcatctgggtcgggaagatcaccggcaccaccggcagcgccaggcgctgggcgatccacagcaggatcgcgcctaacgacaccgcgctcccctggcggttaaccagcactttatccagccatagcgcgtcggaaagacgatacacgccctgcgaggcgccaaagccccactcgtcgtaaaacagctccagcaatcgttctatctggcgctcctggtcccacgacggcgcaatctcctcctgcgcgaggcgcagcaatcgctgcagctcttcctcgacaaaacgcgacggaaaatcgtcgcggacctgttcagaaatgaggaccatgccatcacacaatggcgctttgttaaattcgaaatccgctaatgaccccatgacctaccccagtatcggtattcttgtgatggcgagttgaatgatgataaacaacaccaccagcgccagcaggaacgcgataaagcggctctgctggctgcgcggacgacgacggcccaacgcgataaaacctaatgcgatgtaaatgataacgccaaacagcttttccgtcagccatgcgccgtcttctgtgaacggcaggtagtgcgttatcgccattaaccccgcgccgctgagaaacagcagcgtatcgctgcagtgcggtgcaattcgcacccaccgctggttcagcagcgggctctggtgatacatccaccagtaacgtaaaacgaacaatcctaccgacaccgccactgtggcaatgtgcaggtagaggacagccgtgaataagttcatcagccaacattctccatgtcgggtaaacgtccgagggtcagacgctcattgtcgccatagtcgcgacaggtcgcgacgtccagatagcccgcttcgcggaacagcgcgcgaaccgcctcgccctgagtccagccatgctccagcagcatccaaccgccgggctgcagatactgccgtccctcgcggatgatatgcgccagatcggccagcccctggtcgcctgcgaccagcgccgtcaacggctcaaagcgcacatcgccttcggcgagatgcgggtcggcggcgtcgatataggggggattgctaacgatcgtggcgaagcgctgcccggccagcgcgctaaaccagtcgctttgacttatcgtcacattagcgatgctcagatgttcggcattgcgcaacgccagcgccacggcgtccggcatcacgtccaccgcggtgacctcacagtccggacgttcgctggccagcgccagggcaatggcgccggtcccggtgccgaggtcgagaatacggcacggcgcggttggcagacgcgccagcgcctgctctaccagacattcggtatccgggcgggggatcagcgtcgccggggagacgaacagcggcagcgaccaaaactcgcgctgcccgaccagatgagcaataggttccccgcgctggcgtctcaccaggagcgcctccagcttcgccgcctcgtcagcagagagcgtcgtttcaccgaaggccaaaatccaggttcgcgcccggccggtaacgtatcccagcaggatctcggcgtcgcgtcgcgggctgtcgctctccgccaggcgggcgatcgcctgctgcagccaggcctgaaaggtcatcattcctgctcggacagcgccgccagctgatcggcctgatgttcctggacaatcggctcaatcagcatgtcgagtttgccctccatcgcctcatccagacggtagagcgtcaggttgatgcggtggtcggtcacgcggccctgcgggaagttataggtgcgattgcggtcgctgcggtcgccgctgcccagcaggttgcggcgcgtggaggcttccgcctgctgacgtttggccacttcggcggcgcggatgcgcgcgcccagcaccgacagcgccttggctttgtttttatgctgagaacgctcgtcctggcactccaccacgatgccggtgggcaggtgggtaatgcggatagccgagtcggtagtgttaacgtgctgaccgcctgccccggaggaacggaaggtatcgatgcgcagatccgccgggttaatgtccggcatttcggcttccggcagctccggcatcaccgccaccgtacaggcggaggtgtggatccgcccctgcgattcggtggccggcacacgctgcacgcgatggccgccggattcaaatttcagccgaccgtaaacgccgtcgccgctgatcttggcgatcacctctttaaagccgccgtgctcaccttcgttggcgctgaggatctctacctgccagcggcgcgattctgcgtaacgggtgtacatgcggaatagatcgccggcaaacagcgctgcttcgtcgccgccggtcccggcgcgcacttccacgaaggcgttacgctcgtcatcaggatctttcggcaggaggagaacctgcagctgttgctccagctggtcgcctttttctttggcgtcacgcagctcttcctgcgccatttcgcgcatttccggatcgtcgagcatcatctgcgcggtttcaatatcctcctgcacctgacgccagtcggtatagcagcgcgccacatcgctcagttgagcatactcccgcgacagcgcgcggaatttatcctgatcggcaatcgtcgcggcatcgccgagcagcgcctgcacttcttcatggcgctcgtacaacgcttccagtttggcaacaatagaagacttcataggcgtgaattcaccctgtcctgaaaataagagaaaggtgcgctattccagcccgaggctgttgcgcagaatatgcagacgttcgtcgtccccgtcacgggcggcctgctgaagagatttggttggcgcgtggatcaggcggttagtaagcttgcgcgccagatcctgcataatttcctgggcatcaccgccctgctccagcgcggccagcgctttcgccgtcagctcctcacggacctgctcagactgagaacggtattcgcgaatggtctcgctggcgctctgcgcgcgcagccaggccataaattcgctggtttcctgctcgacgatcgattccgcctgcaccgcggcagccttacgctgcgccaggttatgctgaatgatgttttgcaaatcgtcgacgctgtagaggtaggcgttagccagtttgccgacctctggttcaacgtcgcgcgggacggcgatatccaccagcagcatcggctggttacgccgcgccttaagcgcacgctccaccatgcctttgccgatgatcggcagcgggctggcggtggagctgataatgatgtcggcctctttcagccgttcgtcgatatcgctgagggctatcacctcggcgcccacttcctccgccagcgcctgggcgcgttcacgggtgcggttggcgatcaccattttgcgcacgtgatgttcgcgaagatggcgcgctaccagctcaatggtttcaccggcgccgaccagtaacacggtgacgctggagagcgattcaaagatttgccgcgccagggtacaggcggcgaaagccacagagaccgcgctggcgccgatatcggtttcggtacgcacgcgcttagccactgaaaaggatttctggaacatccgctccagctcgctgacgttaagatggccgcggctggagtcggcgaaggcttttttcacctggccgaggatctgcggctcgcccagcaccagcgaatcgaggccgctggcgacgcgcatcagatggctgacggcgtcattatcctgatgccagtaaaggctttttcgcaggtcttcttcgttgaggccgtggtagttgcacagccagcggatcagcgcttcctgcaggttatcctgctcttcgacgctgagatagagttccgtgcggttgcaggtcgacagcaccaccccaccctgcaccatcggctgagccagcaagctctccagcgccttatcgagcgtttccggcgaaaacgtgacgcgttctcgcagggcgaccggagctgttttgtgattgatgccaagagctaaaagggtcattgtgagggagtagtaccagcgttgctaaggttagtctgagtgcatcatacaggatgcgcgtaatcaataaaagagaggctccccttttggagtaatagttaaagcaagaccgccattaaggttaattttttgatttcagacaacttgaacgtagacgctatggcccggcgacgctagcattaagggttataaatgtaacctgctacacaaatcggcccgctgttccctgtcgccgtttttccctgtagacatcaaggatttgtcatcattatgaatcgactgttccgcctgctgccgctggccagcctcgtcctcaccgcctgttctcttcatacgccgcaagggcctggcaaaagcccggattcgccgcagtggcgtcagcaccagcaggctgtccgcagcctcaatcagttccagacccgcggggcgtttgcctatctttccgatgagcaaaaagtctatgcccgcttcttctggcagcaaaccggccaggaccgctatcgcctgctgctgaccaacccgctgggcagcaccgagctgtcgctgaccgcgcagccgggcagcgtgcagctgatcgataacaaaggccagacctataccgccgctgatgccgaagagatgattggccgtctgaccgggatgccgatcccgttgaacagcctgcgccagtggatcatcggcctgccgggcgacgccaccgactattcgctggacgatcggtaccgtctgcgtgaactgaactatacgcaaaacggcaaaacctggcacgtgacctacggcggctacaccagcgatacccagccagccctaccgtccaatgtcgagctgaacaatggcgctcagcgcatcaagctgaagatggataactggatcgtgaaatgatgacccgctggccctctcctgcaaaactgaatctgtttttatatatcaccggccagcgggccgatggttaccataccctgcaaacgctgtttcagtttctcgattacggcgatacgttgaccatcgaaccgcgtactgacggccaactgcgcctgctgacgccggtggccggcgtgccggacgaggagaatctgatcgttcgcgccgcgcgtctgctgatgcatgccgccagcgaaagcgatcgcctgccggcgggcagcggcgccgatatcagtatcgataagcgcctgccgatgggcggcggcctgggcggtggctcctccaatgccgccaccgtgctggtggcgctcaaccatctgtggggctgcggtctctcggaagatgagctggcgactcttggccttcagctgggggccgatgtgccggttttcgtgcgcggccatgccgccttcgccgagggggtgggtgaaatactgacgccggtagaacccgaggaaaaatggtacctggtggcccacccgggggtcagtattccgacgccgatcatttttcgcgatccggagctaccacgaaataccccgcgccggtcaattaatacgttattaaattgtgaattcagcaacgattgcgagcttatcgcaagaaaacgttttcgcgaggttgatgccgcgctttcctggctgttagaatatgcgccgtcacgcctgaccggcacaggggcctgtgtgtttgctgaatttaacaccgaatccgctgcccgtcaggtgctggacactgccccggcatggctaaatggctttgtggcgcgcggagttaacctttcgccgctcaagcaggccctgctctgaatcctgcgccgtgatggcacattgataatgagtcagccggggaaattgagttacggtgacaacgtcaccctgttccagacgttgcatcgtgctctttaaatacaccgactggatcgaatggcgccatcccgcacattattggcccattcatccaccactggacgcatgcctgaggttcttctcgtgcctgatatgaagctttttgctggtaacgccaccccggaactagcacaacgtattgccaaccgcctgtacacttctcttggcgacgccgctgtaggtcgttttagcgacggcgaagtcagcgtacaaatcaatgaaaacgtacgcggtggtgatattttcatcatccagtccacttgtgctcccaccaatgacaacctgatggaactggttgttatggttgatgctctgcgtcgtgcttcggcaggtcgtatcaccgccgttatcccttacttcggttatgctcgtcaggaccgtcgtgttcgttctgctcgtgtgccaatcaccgcgaaagtggtggcggattttctgtccagcgtcggcgttgaccgcgtgctgaccgttgacctgcacgcagaacagatccagggcttcttcgatgtgccagtcgataacgtgttcggcagcccaatcctgctggaagatatgctgcagctgaacctggacaacccgattgtggtttctccggacatcggcggcgtcgtgcgtgcccgcgctatcgctaaactgctgaatgataccgatatggctatcatcgacaagcgccgtccgcgcgccaacgtctcccaggtgatgcacatcatcggcgacgttgccggtcgtgactgcgtgatggtcgacgatatgatcgacaccggcggcaccctgtgtaaagcggcagaagcgctgaaagagcgtggcgcgaaacgcgtattcgcttacgcgacgcacccaatcttctccggcaacgctatccagaacatcaaaaactctgtcattgatgaatttgtcgtctgcgataccattccgctggcaccagaaattaaagcgctggataaagtgcgtactctgacgctctccggtatgctggctgaagctattcgccgtatcagcaatgaagaatctatctctgctatgttcgaacattaatcgagcccagcacaaaaacccgctgcggcgggtttttttgtctccgcaccttatttgtatgatcaatgcctccttcacctgccatttagttgacagatgatgcgctcatggatgaaacattattgtgaacagattattttcctcacatgtgatgcctttccgcgccctcatcgacgcttgttggaaagaaaagtacaccaccgcccgcttcacgcgtgacctgatcgccgggatcaccgtcgggatcattgcgattccgctggcgatggcgctggcgattggcagcggcgtgccgccgcagtacggcctctatacctcagcggtggcaggaattgtgatcgccttgaccggcgggtcacgctttagcgtttccggtccgaccgccgcctttgtggtgatcctctacccggtttcccagcagtttggtctggcgggactgctggtggcgacgctgatgtcggggatctttttaatcctcttcggcctggcgcgctttggccgcctgatcgaatatatcccgctgtcagtcaccctcggcttcacctcggggatcggtatcaccatcggcaccatgcagattaaagatttcctcggcctgcagatgccccatgtgccggagcattatctgcagaaagtggcggcgctggcgatggccctaccgaccattaacgttggcgatgccgccatcggcgtcgttactcttggcattctgatcctctggccgcggctgggtatccgcctgccgggccacctcccggcgctgctgggcggctgtgcggtcatgctggtggtcaacttgctcggcggcgatgtcgcgacgatcggctcgcagttccattatcagctggcggacggcactcagggcaatggcattccgcagctgctgccgcagctggtattgccctgggatatgccgggctcaaactttaccctgagctgggcctcgctgcaggctctgctgcctgccgccttctcaatggcgatgctcggcgccattgaatctctgctgtgcgcggtggtgcttgatggcatgaccggcaccaagcacaaagccaatagcgagctgattggccaggggctgggcaacattgtcgcgccgttcttcggcgggatcactgccaccgcggcgattgcccgctcggcggcgaacgtccgcgccggcgccacatcgccggttgccgccgtgatccacgccctgctggtgatcctggcgctgctgatcctcgccccactgctctcctggctgccgctgtcggcgatggccgccctgctgctgatggtggcatggaatatgagcgaggcgcataaagtcatcaatctgctgcgccacgcgccgaaggacgacatcgtggtgatgttgatgtgcatgtcgctaacggtgctgtttgacatggtgatcgctatcagcgtcgggatcgtgctggcttcgctgttgtttatgcgccgtatcgcacgcatgactcatctggcgccggtcaacgtcgaggtgccagacgatgtgctggtgctgcgggtaattgggccgctgttctttgccgccgccgaaggcttgttcaacgatctggagacccggatcgccggcaagcgcatcgtggtgctgaaatgggacgcggtgccggttctcgacgccggtggcctggatgccttccagcgctttgtgaacaagctgccggaaggctgtgaattgcgcgtatctaacctcgagtttcagccgctacgcacgctagcgcgcgccggcgtcaagccgctgcccggacgcctgagcttctaccccgatcgtcaggccgcgctggctgacctgtgatcacccggcggcaggtccctgcgcctgccgcatcaaggatccggtcgcctgctgcagccagctcagcaccgccggcgtcatccaggtgcccttcatcaaatgcggctcctgctccattgcccgacgaaacttctgcaacgtctgcggccgggtaccggcgtaggactgaaacagttcaagccacgcccgggccagcgcctgacccgacgccgagtccggcgctacgccctcccggcacgcctgatgcagcttcgccaccagcgcaggccactcctgtagccggtcaaaatagtgctggcgggtgaacgccatctcttcttcgtcaaggtaccgcgcccagatggccagtttgctttcggcaaagccctcggtgatataggcgatgattgccggcgtgacgccggtctgttcaaccatctgcggctcggcggcatgcatctcgttcaggcgggtcagaaactccggacgcccggccgtatcctgctccaggcgctccatccagcgcgtcgccagacgcatcgcctgcggactgtccgtcgggcagccgctcgccatcagcgtctgcacctcctccgttagctcgcgccacgcctgcgccctctgttcatcctgtgccgcaaacggcagcgcggctaactcctgttgactaaaccaacgatcgtacattttcattaactccagcgtctgtagccaggactccagatcgggttcattgccgctcgccagcgcctcgcgcagcaccaatagtcggtcgcgcagcctgccaacatcgcgtagctgggcgttgagcatatctatctgctgcgtcagcagctcgggcagcgacagcgtttgccgatcgagatagtccttgattgtggcgagcgttagcccggcctgcgccagcgcctttatcatatgcaggcgctgaaccgcggacaggttatagagccgatagcccgcctcgcttctggccgaaggcgttaacagccccgtctgttcataatgatgcagcgtacgtaccgtcagtccggcacgcttcgccagctctcccacctgaattaacatgactgctcctctctgtggccaggtccgctactctgcagcctgacgtaacgtcagggtcaagcaaaaaccgcgcttgctattcatttttgctggcaaccatagcagcacgaaggccaggacggaatgggggcgtaatatggcgggaaaaagaggaagagataaagtgagacacagaaaagcgcatcggcctttagcggccgatgcgggaaatcatgctacggttagctgtgacgatgctggttacgacggcagcgtttatcgtagtggcgcacccaccagtagcggtcgctgacctgctcgtggccgccaatacgggcaccggccagccagagcactgcgccaacgaagatgcttaggattgcgccatgcgcaaagaattgtggcaggttaagctgcggaagctggttcagaatggagtaacctacccccacaaccatcaccaccaaccctaaccccatgagtacgttaccgagtaacgaagcgtttttgcgtttcatgtgtcacctccggactttgggttgccagggaatgtccccaaatcttataggtgtagtatagacaaggtctcttctgcggagtgcgtccacgatcacattagtgaacagcgaatagacaaaaatttacaaataagtctatgaaccatatcaaattctaatgatttagtgagtaaatcatcaatgcgggtattgtctaatagccagaattttgtcaagcgcgcccgcagacagtacactacgcggcagagaatgccccatgcaggatagaaaacgtgaccattaaactaattgtcggcctggccaaccccggtgcggaatatgccgccacccggcacaacgctggcgcctggtatgtggatttactggcggatcgccatcgtgcgccgctgcgcgaagagagcaaattcttcggctacacctcgcgcatcaacctggcgggcgaggacgtccgcctgctggtccccactacctttatgaacctcagcggtaaagccgtggccgcgatggcgaccttttatcgcatcaacccggatgaaattctggtcgcccatgacgagctggatttaccgccgggcgtggcgaaatttaagcttggcggtggccatggcggccacaatggcctgaaggatatcatcagtaagctcggcaataacccgaactttcaccgtttacgcgtcggaatcggccatccgggcgacaaaaacaaggttgtcggctttgtgcttggcaaaccaccggccagcgagcagaaactgatcgatgacgctgtcgacgaagcggcgcgctgtaccgaaatctggttaaaggacgggctgaccaaagcgaccaaccgtttgcacgcctttaaggcgcaataagccgttggcgtgcggcatttttgccgcgcaccgtgtataataggcaaagctattcaattttctgcaatctgttccttgtaacagattgattatccaaagattaaggtgatttaaatcatgggattcaaatgcggtatcgtcggtttgcccaacgtcggcaaatccaccctgttcaatgcgctcaccaaagcgggtattgaagcggccaacttccccttctgtaccattgagccgaacaccggtgtcgtaccgatgcccgatccgcgtctggacaagctggctgaaatcgtcaaaccgcagcgcatcctgccgaccaccatggagttcgtggatatcgcggggctggtgaaaggcgcgtccaaaggtgaaggtcttggcaaccagtttctgaccaacatccgtgaaaccgaagccatcggccatgtggttcgctgctttgaaaacgataatattattcacgtcgcggggaaagtgaacccggcggaagatatcgacgttatcaacaccgaactggcgctgtctgaccttgatacctgcgaacgcgcgattcaccgcgtctccaaaaaagccaaaggcggcgataaagacgcgaaggttgagctggccgcgctggaaaaatgcctgccgcagctggaaaacgccggtatgctgcgtgcgctggatctgaccaaagaagagaaagaggccatccgctatctgagcttcctgaccctgaagccgaccatgtacatcgcgaacgtcaatgaagacggtttcgagaacaacccgtacctcgatcaggttcgcgccatcgccgagcaggaagggtctgtggtggtgccggtgtgcgccgccgttgaagcggacatcgccgagctggacgatgaagagcgtgacgagttcatggctgagctgggcctcgaagagccgggcctgaaccgcgtgatccgcgccggttacgctctgctgaacctgcagacctacttcaccgcgggcgtgaaagaagttcgcgcatggaccatcccggtgggagcgaccgcgccgcaggcagccggtaagatccacaccgacttcgaaaaaggctttatccgcgcgcagaccatcgcttatgaagacttcattgcctacaaaggcgaacagggcgcgaaagaagccggtaaaatgcgtgctgaaggtaaagactacatcgtgaaagatggcgatgtgatgaacttcctgttcaacgtctaatcccactggctggcgttttcgccgccaccgcgcaaaaaaatccacgcagcggcgtggatttttttttacccaggcgacacgctactccacaatatgggtatcttctgccgcctcgtagccatcaacgatctgcacaattttctttaactcagcctcaataaaagccggggtagcgctttccccagaggccgggtgatgaagctccaccgagatgccgctggcggcattggtcagcgacaggctgatctcctgctggccccgcgaggacgaagaacgcccgatatgctgcatgatagccgccgccgccgcgcgcgtatcaacgtctgcgagatgcccccatctcatttcaacatgcccctgctgccctgcctttatcacctgcagcgtatagccgcttcttgccgttgccatgccttttcctccgatttagttgcccgggagtcgcattatcagcccggttttatcagccaggttcgcgcacctgcgccttgccgttaatgactcttttccacataggtctgcatgttttctttggtcactaactcaaacgggatccagacatgagactcgaccttttctcctttaatcagcttcagcgctaccgctaaggccgttttgccctgaccgacggcgtcctggaaaaccgtcacctgaatcttatcgctggccagggctttcagcccgtccggggtggcgtcgatcccgccgatcagcagcttcttctggcttttctccagcgccatcgccgcgccaatcgccatctcatcgttgttcgccgccacaatatcaatcgcttctccgttgcccgtccagttctgcatcagatccattccctcgctgcgggaatagttggccggctgtttctgcaccactttcattgccggatacttggccaccacctgctccacatctttggtgcgctgcagcgcgccggcgtcggtgagattgccgatcatgatggcgacgttgcctttgtagtttgccagcttcgccagcgcctccatctgcaatgtgccagactcccgctcgtccgaaccgacaaacaccacgccgggcggtaacgtttttatcccccggcgtccggttcacatacaccagcggcattttggcctgctgcgccatcttcgtcagctgcggggtgctggcggagtccaccgggtcgacgatgatcgcgtccacgccggaggcgatgaagctctgcacctgatcggcctggcgtccggtgtcgccgcgggcgtcttcaaactgtacgtcgacgtggcgggcttgagcttctttctcaatggactggcggataatagtgagaaagttttgatcgaagtaggccattgagacgccgatcttctctgctaatgccgaagcggaactggccagaaggcctactaacaagatgattttacagtgcttcatagtatgccctcagagatcgaaataaaattttcaatacaactacaaacggtatatttaaatcattttcagactacgaagggcgttcggttcttgcaatattgatgtaaagaaaatgttgccatgcgcacactttatttcaccgcctcactcaccgagggctcaccggttgcggggagcgcagcggtcggcgacgccggctgttttcgcttcagcagggcatactccactatcagctgttgcagatgcagctccgcgaggcttccccgcgcggctggccagggttgatcaacgggaagcgcggccagctggcgcagctgctcctccagcggaacagcgcggttaaacgactgtgtgatggcaaatactgcggttttcagttcgctcaccgtcaggtacttccccttctgctcgtcgagggcattgagctggtcggcgagccgctgcagctgctgcatgccctccgaccagccggtaagattttccgcgggcaatgcgccagcactcagctgctgccgccactgctgcgccagcggttgcgcctgatccggccagcggataagggcctggtggaccagctggtcgccgtagctgaccgcccagtccggcgccaggcgggcaagctcgccaagctggcgctgcgtctgtggcagatcaaccggccccgggggcgttgtcgccggcaggcccggtatcggtccggcattttgggtgaccgaaatgggcggcaagtcggactgacgcagcgccagccatccgccgacggcgatacccgttaccgccagcatggtaaccattccggcgataaacggcttccagcgcggcgcggctgccggagtagacgccgccaccggcgcgggccgctttgcaggtgaaggcggagccagcggttcagcctttggtctacgttttaggtctggcagtggctcaaccttcgccgcatcctcttcgctgaccagagtgccgggaagttccgcgtcagacaccgccaccggcggcgcggtgggaagcgctggcgcagggtcgaggctctcgaagcgagttgccgtgctgtgcagtagcgcccgcaggtcgctcagctggttttcaggagcgatctcaaggtgctggagcactgcgtcgaagctttgcagcgaacgttcagcctgctcaagcgactcaacatcctctggggtaagattcagggtacggatcacctgccgcagccgcttgctcagggtgcggaagatctctgtccgggccgggagcgcctgtggccacaggtttttcccctgacgaaccagcagcgactccatcagcgtcagcccctcattgatccctgccaccccgcccagccgggcgcgggccagggtataccaggcgacagtctgcaggtccgcgccgtgatgctccaacagcccgcgggcaagctgctcggcatacggccagttaatatccggccgcgccgggtggctgagcttgttcatttccgcacgcagggccataaaatcagccagcgtgcgcgggtcgccaccggctttatagtgacggtcgtggtgtgttgtcatcatgatgtctttcagcgagagattagagggcggagcgggcgtcaaggtactgctgacgtttgaggtggcggatcaacaccctgccctcggacataaactccgtgccgtaacgcaccaggccaatatccttcagctccgcatcaatggcatagcgcagttcgccgggcgcatgctgatcgagcatcaccaccgcgatccgctgcaggcgcggttcgtatttcagcaacaccgccgacaacgtgctcatcagctggtgcgccgacgctggcatcccctggaggatagcggtcatatccggcaggccgtagtccggcagatgcgccagcgttccggcccgacagttgaggatgcgctgcatgttatcgagcaccgacaggatgacctgatccgtttcgctgacagtattcaggtcaagcccgccggcgaaattgccgtacaggatgtcatacagggagggacgaggcattttcatttctccttaaacgggtgcagcgtcagttgattttggctggcttcgataatgcgcggcctcgccggatcaagttcgtcccgggtgagtaccagccgccagctgttttgcgtcagatctggatcgataaacatggccgccaccgccacaaactgcgcgctggtttccatgggcatatcgacggtcaccgattcgcccggacgcaggcgaacatctttttccgccacccggtccgcctgcagcgcctggccatcgccggcaaacagcgacgggtagtcagtattgtcgaacgcttgccggtccttcagctgataaatacgcaccaccgtcgccagggaggcgcctttggcgttgttattcacgccttcccgggcgcgaagatccagatgcagggttttcacctgggggtaaaaaatggactgggtcacggaaacggcgccgtctttcacggtctgcgtcagtccgcagccggttaagacggtaaccatgaggaatgccagcaacctggcggagggtttaactgcggtaatcgccatcttcatcgctctccctgcggtggatattttcccggacgcgctgatagcgccccagataaatcgtgactctgtcgtcagcctgtttctgcgcatccagaggacgcagcagagcggtacggccgagctggacggcatgctcctgctggcagcaaagttgcgcatccggcagtaaacggcgggcgacgcaaagctgcagccgcacgtcaagatgagatccgagccagacgtgcagaagcgccatcaggtcgctgaacagttcgccgccgggcagccagccgcgaacctcatcaggcttttccgttgccagctgcagcaatacctgaccgttcacatccgtggcgtaggttcccatcactggcctatgttgcaggctaaccggctgacggacgctcatcgttaacggctgcgacaaggggatccggcagggatcgtggtggtacaccgtcgcccgggtccccggggccaggagcgccaccagcgcctccatgccttccccggatctccccggcagcatcatcaccggcagcagcgccagaaatcgcgacagcggcgctgcggcaacggcggcacatcccggtatgcccagccccgccaggcccagcagatactgcgagatgttgtccgtgccgcccgcccgaaaggttgccgggtaggaatatttgcgccagatacggtaatactgggcgatcagccgatggttaaagatatcgaggaaatcctcggtggcctcgacgccttcccgccgttgcgcaatgtcatcgctatagtgggtcggcagcggggattccacgccgtagagtcccataaaagtcacgcgaaccgccggcggacggggcggttcaggatcgtccattccgcggatttcgccagccggaaagcccatccccggatgcgggcgaaagcgtatgggttcatcacctaatagccagccgctgccgatgatcggcgccttcggatggttcttctccagcaactggcagaagcggtaaaaattcatgtacggcaactgaggccggagctgcgccatcagccgggcaggcgcagactgtgattctctttccaccggatacatttcccttcaggttgaacaatgagcgtcagctggttgaactgattcatatcggcatacagtgcgaaaaagcggttgagcatgtcgccaaacaggtggacatcgcccgcaccggtaaatccgctaccgtcgagcgtcacttcgatatccagcccgcgcagcaggaagccctgctcgaaacgctgaattcggtgatggctgaccgccagaatggcgtccagacggcgattattaagctcatcctcccgccagttgtagagcgacagcgtgccgcgcagcacctcggcgctgctcatcatgttgagaaaacgggtgcccagatggctcatgacccgccagtggtagcggtcttccgccgggggataggccggcagcgtgggcttacagagattgcggacggtaagcggcgtggctgatatcgactcacagcgatccagcagcgtgctctgtagcgcccggcgcggcagctggccgttagtgccggtgatgcgcaaggagaccgtttcccgcgccagctcccggtcagcctcccattgctgtccgccgaggataagccaggtatcgtgcatgccggttacgccccgttttacgcgggtgtggtagtagcgctccggcgcatggcgacgcatcattcccccctggtgacgaaagcgggtgaaaggcacatagcgtgcctccccggtgcgcccggagccggtcacgctgtcaacagaatagatttcggtatgcccgtcctgcaagcgcttcggacgcaggaggtattcgctctccagcccgctgatggtcaacggatcggcctcaagggtaaacaggttaatcaccggcacacagtgcaggcgcaggctgcttgcgctgacgggtaaatcactttgccagacctcgctgaacaccacctcaagcgtgaaatgcgatatccccgccggcagggtgatgttttccaggccatttagctgcacgaacataaatttttcgcgaaaggtgaaatactcgagcagcagctgatagccgctgaaagcgctctcccccttcggccataaacgatcctcctcgctgaatccccccggggaaaaatagccgtcgaggcttacccgctctgtctgacccggcagacgcaggtacagcgcggcctggcgtcgggtcagccacagatggagggcgctgccggtaacggcgtcttcccccaggtacagcgccaggcggcggagatcggtctgcgaccagtcagccagctcgctacaggcgaatcgtagtcgcagggccgaacgtccgtccggctccgccgtcatcaccgcctcctctatcgccagcgggttaagcgtcagatcgcgggtggttcggtaccggcacacggtatttttcggccccagtgggcgggagctaatctcaaacccggcgggcaccgtttccgccatcttcatcgccggcagcgttggggtcagcgccacgatcgatagcgatggaatagtgcgcaaatagtgcggccacagcatgctgaccagcccctcggtcagctccggcagatcatcatcaattttttcgcgcaagcgacctacggaaaaggcaaagccttcaaacaggcgctcaacgtaagggtccggcgtaccggctttatcgagatccagcatcgccgcccgatcggggtgagcctgcgcgaacgcttttgccgcctcgcgcaggtagcgcatttcagcgtcaaaatatcgcagggttaaatcgtccattatgaatattcccttattcgtctacagggagacacgcagcatggctgcgcggtcagattagttggccgtcgggcggccatgagcgaaggaggcctggcgttgcaggtcaacgccaatcagtgagggagaaggttcagtatccctcttcgccgggtatatcgtcggtcagcggaacacattcagcagacgcgcgcacgctgaatatcgtctccggtagcgtaaagtttcgcagcgccaacagcgccagcggtccttcccccgcctcggtacgcagcgtgtagttcagcaacagaccatccggcgctttccagctcaggctccagctgctgctcgttccgggataagcgctgaccaccgccttatccagcagacggatccacccccaggcgcccgggaaatcgccatactggcgggtgcccgcccgggtactgacccagctcagactggcgcccggcgcttcggtgtcagcgggccagctgaaccgccgccagaccggcatctggttcatatagacaagtttctgactgtcaatgaccagctccgtctgcatcacgccgtccgccgtgccggggcgaagcgcaaaatgcaatcccgcttcgccgttggcgaacgcgacgtcggagagatggctcagggtattcatcgcctccagaaaggccgggttaaacgtcagcccctgagcattgatactgtccgccatccagcggctcccctctttatgcagcacgccgttcagccgggtctgcagaaagcgggcgatgcgcccggtctcgctgtcgaggtattttgccaacagcggcagagagacttcactgctggtatttttaaaggggtagcggccgccaaaggcgctattccagtcctccaccaccgcgctgcgccactgggcgttgagactttccgccgccggggtcagcacctgctgccaggcctgttccatcgggcgaacaaaaagcgtttgcccaaatccactccactgctggcccagccccgccgccaccaggctgccgtagtcgcgcgtttcggttaaatccacggccttgccctggaataccgtctgcgcaagcaggcgggtcatcgcctgcgggtcggtggcgttggtgacctgctgcaggcgcagacgcacctgggtgatgcgggtcaggaaggtctgcaggctaagacggctggtgggcggcccgccgtcgcgattgtccagcagcgccagcacgggtccgaaggtggcatccagaggaccgcgcgcgccggaccgttgatcgatgacgggcgagttatcacggttaaacagctgcctggccgatttgaccagcgaatcggcgatggcttccccggtctggccggttcgcccctgcacgctcagggtgttcatcagcgccaccagcggcgactggcgcacatcggccatcagggtcagctggtcgatagcatcggagagggtcgccgcgcgctgccagcgcagactgttgaggaaatccagccaggagccgctgaaatcagcgaaataacgctccgccagcctggctcgcagagcttccggcgacgtcgactgcgcggcagtctgcttcgtatcgctcaacacccagtccatttcatcgcggcgttccgcgaccactttctcaatggccggctgcacggcctgctcccaggcctgacgggtaaacatgcccggcaccacctcatcagtgctgaacagacgcgaagcatcggtgtcggcagtcatatccgccaggcgcatatcggcatactgattcgccacctgcgcgagcatcttctggtaaagcgtggactcactgttgcgctggcccatctgtcgaattaaccgtgtgcgcacctggctgaccagaccatcatcgacaggcagacgccactgcggatgcgacaccagactggcggcataaaatgccagcagcgaagggccgctgccctgccagacggcgtcggcgatgcctgagcgctgcggccagtcctgcattagcgtagtggcgaaccacgcggcgtccattttttccgggcgggtcaacatcagatattgtttcagttgtccgtaagcggtcttcgtcatcttctcacgcagtgggctgtccggcggcagctgcacgaaggcggtgagctgctcttccagatgatgcgccgccgcatcgcgcagcagcggttgcgccatctccccgtagcgcggaaacagcgccgccagcaggtcatcattctggctgagaccgccgcgggcataccacggcgcgccgtgctgcgagcggtattccagttgagaaagcgttttctgtaacgcggagagcgcatgcaggcgtacggccagcggctgtttctccgctgaggccagccgcacctgctcctgtgcgatcgccaccaggtggcggttggcgataaaagagactgtcattgaggcggcccagagtaacatcagggcggcggcggccacgctcatcccacgcatccagttgactccctgtttgcgcggacgtagaccggctggcaaccacagcactgagtctggtatcgtttcccagcggttatcccgtccccagtgatgacggacactgcgaccagcctctactgacgcctcactaaataccaccccggccatcggcaatggtcggtatggattaagcagtatcgataacggttccaccaccgcttccgcttcccgagtcaactggtcggccagcgcgagtaaaaaattgtgctgtggttgcccgcatatctgctggatgccctgctctatcagtaacgacgccagggcagtgaactgttcggcaactatttgcggcgtacaacctgcaggtaacaggcagcctacaggctgagtgatacgtccatttttttcgttgcccccctcatacagcgaccagacgtataggggtagtttccagccaatagcttcgaagcgtagctttagagagtgagacacactgtccatttcatctggcgtgagcctgggcttcgttctgttcatcgttgtcaaaacgccgtcaaagcccgatgttatccacaccataccatcagccgggcgataacgcagtttacgcagcgctgtgaaccaggcgttatctaccgctgccccagggtctccaccccacagcaataatgtaccttgatcttcctgccagagttcctgcgtgagctttggggtcagttgttctacgtctctgactgagccaattatcagcagaatacggactttgcgggaccaggcgcgtccatactgatagcgtagagtctggcgaatttcccccaccgtaatatgatggggaggtgtcagcgccacgcgcccttcttcgccgggtaagacgctggcctgctgcgactgccggcgatataaactctccttcacacggcgggacattgcaggaaggtaaaaaacaaataccaacgccagacagacctggacaaacgccagtacctgctcgccccgcgtattgatattcagcatgccgccatagcgggtgatcccccaccatattgcagccatcccggccaacgtaagcccggccaagccaaaccggcccaggccattacccggtataatcatcttcactccctggggtgatggtactgataaaatgttcctgttcgctggaaaataacgccagcaggggctgtttacggaggctgaccagatcggctgccagcgcggtcaggagccagggcgctgcgggtcccggaataccgcaccatttttccagcagcgcgatatcttcagctttccatggggtatgcattttgccgccctgcgtgataagcgcggcgcttctttccgtccatttttttgcgtccccgataacggagggcgtctggcaggctacagtctgggtttccagaaacagggtgatatcgtcttcaaagttcgtcatatctaagggcataggacgtaacagccgtgatgagtgcggcagatggtatttttgcgccacatcatcgctggtcagcagcagcacggccagcccgtcggagtatgctgtaccaccgttgagctggatgaccaggagtaaattgaccgtcagtacaggctgcttcaggcgctcctccacttccgacagtgagaatgagccggtaacggtaatatcatcaggcacggcgcggccaggaatgtgttctttccagagattactgaaactgctggtcagctcaggcgagggattatccgtgatcagggtgacatacagcggtagctcttccggcaggcactgcacgcgctcttctatactggtcagcagcgcatgcatcgcactcaactgcacgggctcttctaccggaaggtaattaatcctgcgggcaagtccgtattgctgaggccgctcactcccccaatgcgccgcagaaatatgatccggcaacagcactgcactgctcagaacggccagccagcgcccggcccagtcttcccacctctgctgtccgtattccgcctctttcagcaagaactgatgcgctttcagatccctgtcccacaggtagcaacgcaggcaaaaaatcagcaaccagcatcctgcaggcatcagggatacccaccagatatttatcactgagataatttttacggtgccggaggcatggaggataaagagcaggacaccgataatcgccatcagtacaccggcaaacagccatcgggtcagtgaaggagccgatggctgctccatggtcaatgcttttgtccgtacccagcccattttttatcctatcgcgcattccggcgcgccggaaatcacctggcaaccgcactgacatttgcagccatcgaccacgatggctttaccatcggaagaccattccggcgctccctcaataatggcattagtgccatgtcccggaatcgggcagctgactttatcccccaccagcgctacgggctttccatttacaatcatggtggaggatgcggaaataacagcaccgccgtgcgtggttttatcgtcgagtaatacgaaacctttggacattgaatttccttttatatatcagcgatacagtaattattaattagaatactcaatcgcatctatttcaacctaaagagtgaggcaataacatttaataacagataaaaaccggcgactcctgtcaaaggaagaataataaacataaaataatatctggaatatctgcacacctctctttacttaatacatacttcttcccccaggtgatatcccctacattaataatttgtcacttcgaacgccaattgccagacgaccttatactcgtgaaagtcgccttaatttctattgcatgctctatacaataaaaaacatactaacaacaaaataatcagaattataagcaaataaaacagacattttctgattaggtggcaacagtgggtatacctcgctaatatgacgactattgctccctatcattttgcgttcgccataacctatgggaaatccaaatcgttcgcgcatccatcgctgcgtcattactggttcaagactaaaaggcagcggattaggaaataaccaagccgttttattttcatcttctaaccgcaaagtcacttcctcaagattttttctggttatttataaaagatgaaaatattctttctcgcctcatatccagcctgaaaatatcatcactaacagtaatcgttggttttgttttgtagggaattaaaccttgttcataaatatcctgataaggtttacctaattgcttcacaagtgttcgatatcaatattcatttgccaccaagtcgctttttatcaagcgcaatatgaatctcctttgctcgctccagtggataaaaagtcacggtttctgaaaataaatcattgttataggtaaatccgacagaactattttgatgaggtataggtaaggtatatatctcttcccccctataagcagtcataacaatttttgcttcaacgtaaaccatcggaaatcctagataagcccgcacccactggtgaatcataactcgttccagaccaaacggcataggattaggaaacagccagtcagttttggcttcatcttcaaaccttaacatttcttctttcagatttttaatgagcaccaccttttccgttgacaatcatcgttgatgacgatgaaataatttcactactgtacatgattttaccatccattagaaaaaaaccttatatgttgaacgccaccgattttttaaaataagatatagcatcacacattatttattaacgacacaacgaaatacatactgcggaccaacaccatatttttcatagtcatcgtctttactaatctttggcaccggcagatctgattgtctgaacatggttaaagcgtactgtctgtcgccgccaacattcccgcgcaggacttttttagtaccctgcgcagggccctgaggatcgtttaccggagaatgagagtaataatctgctgcataccagtcattggtccattcagagccactgagtcccatatcatacagacctaaggggtttggcgggaacttccctaatggataaaaaggaagcccaataccatcagtataactatccagttcgtcctggttcgggaaattttccccgggtaaaagctcaccattgttggtagcaaacggaagatactgccctctggatcttgctgcatactcccattgcgcctctgtcggcaaatcaatttttttaccggactccttacctaaccactgacaatagtcttttgcctgttgccaggtcacatttgctgaataatcatcggataataaagatggataatttttcataaatggacctaccggcagtgctcttttattagtaagttttgaatactctctataattcttattgctaaccttatattttgatagtaaaaaatcacttaacacaaccttatgtaataccttatcatcctggtttatgctgaaaggcagtttttcaccgactaatgggccaaaatcccccattaagaactcgccgcacttaacgggaaccatgttagaaagcgacttagcaacaagcgcttcagacaaggtttcacgcttgccagtactcttctggtcgcacccgagcagtaaactggcggcaacagtagcaactacgattaattttctcatcttatcacctaagcctttgcatcaggcagtcattgtccccgtcgggtgctggtcgtcgatcatggcaacatattctgacatcaggctatccgggacaggttttaatagtctctccggtttattggaacattcattcaacgttgttgctccggttaaaatgatatatgtcaccaccaaacgacattatttattgatgacgcaacggaaaacatactgcggaccaacaccatatttttcataatcatcgtctttattgatctttggaactggcaaatctgattgtctgaacacggttaaagcgtattgtctgtcaccgccaacattcccgcgcaggactttttcggtcccctttacgggtccctgaggatcgtttaccggagaatgagagtaataatctgacgcataccagtcattggtccattctgagccactaagtcccatatcatacagacccagggggtttgggggatatttccccactggataaataggaatacctgctccatcagtatattcactcagctcatcctggctggggatgtttttaccgggcaggaactcaccattattcgttgcaaacggaatgtattgccctctggatcttgctgcatattcccattgcgcctctgttggtaaatcaaattttttaccagactccttacctaaccactgacaatagtcttttgcctgttgccaggtgatgccaacagaataatcacctttttgcaatgatgagtaatcttttagcagaatattaatgggtggtttttttactcctgttatccgcagatatttattataatcatcattggtgactttgtattttgatattgaaaaatcgcttaatacaaccttatgtaataccttgtcatcctggtttatgctgaaaggcagtttttcaccgactaacggtccaaaatcgcccattaaaaactcaccgccctgaacgggaatcatgttagagagcgacttacccacaagctctttagccgctttttcactcctggcagcatttccctgatcgcacccgaccagtaagcatacagtaactgaaatagctataatgttattttccatttcaatgcctcagtaatttaatcaagcaatcattgtattagttggatgctgctcgtcaaccatggcaagatattctgacatcaggatgtctggaataggtctaaatggttcatccgggccaacggaaaccggaaggttattatgcaataaggtgagcttttcgccataattggtatagaaaaacaattttcgttctccaatgcctaaaaacttaatcacatctttttcattcagttctttactgcctttcttctcccctggcgacaacgtcaaatgctgcatgatattgttataatctgcctgactttgtacccacttcaatgccataaacaccgcttgttttcgtctctttaaaggaccgagcttccagctgttaacggaaaaaaatcattattctgatttcgtggatcaagccagtccgcccagttctgatcaattaatgtggcaatcactgccccttttgtttccggaggggtatatttaagctgatcaggattagacaaaatactgtccatcaaattaacgcgtttgttttcatccttaagatctgctctaatttgttgcaatattacgaccatattcttaagcatggcctcacccacctgtatcccttgcgccgccataataataggaattgcacataaagatcgaaaggcatcccctgccatcatctgctcaagcttctgataatccacattcctcagcatatacataaagctcttcataaaagccgcaaagctgctgccatcaacttcaaaaccgacttcccctttggcccccactccccaacataaagccgctttacagtaaatacgaaaacgtccctgaatataggtgatataaaaaaacccacttcccccagcgcctgcctgcaccgtcatccctgcttccagtttggctatcgcggcaaacttcttctctttattgacaatgggtttgttatctttctcaacatctttagctactggcgtatcatcaggatgcgggtcaaaccactcaatggcaccactgatattacctcccgcctgagcaccaacaaaaataccaatttcacctcccccctgtgcttcaggtatcgttgaggtctttaaattcacctgctgctgtcctggtaacggtggggcagtcagggttgcaggacggcctttaatgccatagccctttcccatttctccactccagtctactgtcacccctaattcaattgcagcactggcaccaacgctacctgacaataccagtttcatggcaaaacgcagcgctcccatattacagacaccatccggtgtctgtggagtcacttttttcgccggaaataaaaggctgacacctaacctgtccggcaggtacagggccgtttcggccttcgcctcccccagtgcaaaactggcatgaccttctatttttccctccagttttttttctgacggattatattccgctgatgcaccccctccatggctgtagcgcatcagttgggccagtgcgctaatgtcaatatactgatggattaggaaatagccagttggttttactttcatcctcgaatgtcagcgtcacttctttaagtttttttcagatcattaataaacgctagatatattccctcacgtttcatatctaatctataaatatcatcactaaccgtaacacttggttttgtttcgtaggggactaacccttgctcataaatatcctgataaggtttacctaattgtttcacaagtgtttcgacatcaatactcatttgataaatacaccacacgtccttgtatcctgctagtactatcttcattgcgcaaggaaatggtccagctatgagcgaaccattgcagaacaattacccacccaacctttttatctctaacgcggcttgtatttctttggctcgctcaattgagtaaaatgtgactttttgtacaaaaaaatctttgttataggtaaatgcagcaacgatatattgatgaggggccggcaaagtataaaattccttcacaccaacataaatagtcatgattatctgcgcatcagtgtaaatcattggatgaccaagtttggcccttacccatttctgggtcattacaggttcaagaccaaatggcagcggattaggaaataaccaatccattttattttcatcttctaaccgcaaagtcacttcttcaagatttttttcttggttattgataaaagataaaaatattccttctcgcctcatattcaacctggaaatatcatcactaacagtacccgttggttttgttttgtagggaattaaaccttgatcataaatatcctgataaggtttacctaattgcttcacaagtgtttcgacatcaatattcatttgcgaccaagtcgctttttctccagcgcaacctgaatttctttggctcgctccagcggataaaaagtcacactttcaacaaaaaaatctttattatagctaaatgacgcaactatattttgatcaggagctaatagcggataaaactcctttactcctctatagagcgtcataaccactttcgcatcaacataaatcatcggcaacccaaaacgcgcccgtacccacggctgcgtcatcacaggctccagaccaaaaggcatcggattaggaaacaaccagtcactcttgctttcatcctctaacgttaatgttacttctttcatttttttttcaagatcattaacaaatgctaaatatataccctcatgcttcatatccagcctggcagtattatcactaaccgagccataaggttttgttttataattaatcaaacctttattgtaaatttcttggtatggctttcctaattgctttatcagtgtttcgacattaacattcatttaatataaccccacatttcggtttaacttatgtagttttgctctgatctcttcgattttctcgttactcataccatattcattcttaaggcattcagcattcgcatcccagttggcattgacggcagcttctaagtcacgagcatctagctcttttttagttatcatctcgccgctttctgtctctaccttacgattattacgcccgccataggtttcactacatttttgatgaacagctattggaatagcaactgaagcaaccttatcaaccatcttatctatatatttacttccctcatcaggatataaatcctctaaatatacacgaaccgcatctctagatggaatatgatcgacttgatattttccctgccttgaacggccttcaaaattttcataatagtcaacctcatactcttccacaggggctttcttaaaatacacatagattgccgggacaacccccatcgggtcaacaataataaagtcatcgaaatcccggtcttcgatgggcaatgtttcaatatttggttcctgttcctccgggatcggcgttcccggtacgggcggtaacgattccggggccgggttaggcaacccccagatgctccgcggttccggaatgggtgtaggcggtgtggtagagccgccagcgctcccgtcatgaacagtcgtctggctggaaccccactcaaattttccctgcccggcagaccgggaccagacaaatgtgcctttaattgaaggatcttcaaaaccccatgtctctttatccagctgttttgcaaaccgcacccggacccgatccaacccgcttttttcccccacctcatagctgcgggaaaccagttcccctgactcaggatcttcttcaatacgaaagcgtaccctcgtgcgcactgtgccgttttgtcgggctatttcccggagttcatattccgggacataatccccctcaatgaccgttgaatttacacgggtaaaagcgcccaccatcatctggccatggatcagattctgatagagctggtcgccacgtatattttgtagcgtttccgtctcaccttcattcagtgacggagaatagaagatagccagcagagcaacggtgaggggattaggcgcagccagcacccgtgcgcccgcgacgccttttccgacacctgccgcagtccccgcccccaatgaaagcgaatttcccagcgttgtggctgttggccctgcataataaccactcattgaggcggccagcgccatcgattcaaaaaatacctgtgcgggtttacgttcaacaaccggctcttttgcggctgatgatgtttttccctctccgggtcccagtatttgtgtcatcccggctttctcctgtccatggctcacagtagctctatttttattgactcaggcaatgcggtataaacgctggccgttttcccctcagcatctgcccggccttcgaataccgggcctttttcagtggtgatgcggtaacgggcaaaaagaacaatttcatcggtcttatgatcacattaggggagcagctcttcttaagaatgtggtcaacattgcgggaacagtacagagatcagggaatatgaattagctctgtaaaaaatcatcatttacaagcagtaaaacattaacgcttatttattcattaatctatttcgctctgacgcagcctgaattgcttctgcatgcgccatagaataaaaagtcacactaacaacaaaaaggtcggcgtcataaacaaataaaacagcaatattctgattaggtggtaacagtgggtatacttcactgataccacgactgtaactccccatagttttaggctcgccataaatcattgggaacccaaaacgctcacgcatccagttttgagtcattaccggttcaagattaaaaggcattgaattcggaaagacccagtctgttatgtcatcatcttctaatgttaatgtaatttctttgaaggttttatttttatcattctcgaaagagaaaaacaatccttctcgtttcatgtctaatgtagctgtatcatagcccgctgtggcagttggttttgtcttatatttaattagtccactatcataaatttcctgatgatctttacccaattgtttcacgagtgtttcgacatcaatattcatttgccaccaacatatccagataggcttcattttcatcaaccgggccatgcagtttattcttatagggaatcaattcttgctcaactatttcctgataaggtcgactaattttcttaataagctgttcgacatcaatactcatttgataaatacaccacacgtcccgacatccggctaaatactatcttcatggagcaagaaaatggtccagtcatgaccggaccattaaggattcattaactctctaatcgttttttctccagtacggcctgaatctctttggcccgttccagtgggtaaaaagtcacggtttctgcaaataaatctttgttataggtaaatgcggcagcgatatattgatgaggagtaggtagagcatagacctctttcacccccatataaatagtcatgatgatttccgcatcagcataaatcatgggcaacccaaagcgctctctaacccacaattgggtcatcaccggttccataccaaatggcatcggattggggaatacccagtctgttttgcctttatcttctaaccttaatgtaatttcagtaagatttttctcggaattattggtgaaaaccaaaagaattccttctcgtttcatatctaattcagcttcatcttcatcaataggaccgtaaggctttgttttataaggaatcaacccgtgactgtaaatttcatgataaggcttacccagttgttttaccagtttttcgacgtcaatgatcatttgccaccaagtcgttttttctcaagtgcagactggatttctttcgcctgttcaaccggaataaatgtgatcctgttaacaaaaaaatctttattgtaagaaaatgccgctgcaatattttgattcggagtcggtaaaatatatgtttcctccaccccgacataaatagtcataatcacgcaggcatcaacgtaagtaatcggatgaccaaatcggtctcgtacccatcgctgtgtcattactggttcaagaccaaatggcagcaagttaggaaataaccagtcagttttattctcatcctctaaccttaaggtcacctccttaagatttttatcttgattattaaaaaatgataaaaataccccctctcgtttcatatctaatctataaatgtcatcactaaccgtaccacttggttttgttttgtaggggatcaatccttgctcataaatatccagatacgatttcccaaggttctttatcaacttctcaacattcaagctcatttaatataaccccgctttccggtttaactcatgtagtttggccctgatctcttcaattttttcatcacttacaccatattcattcctaaggcactcagcattgacatcccagttagcatcaactgcagcttctaaattactggcatctagaactttttgagtgactaatcctccgtcttgtgttctaaatttactattgtttttcccaccataggtttcactacattgccggtgtacttctatcggtatagcgacagcagccactctgtcagtcatttgttctataatgtcatctttcaggtttggatatgtccctttcaaatatatcctaacagcttcctttgaaggaatatgatccacttcatataggccctgccttgaacgaccttcaaaatttccgtaatagccaacctctaaatctctaactgaagctttctgaaaataaacatagattgccgggacaccccccatcgggtcaacaataataaagtcatcgaaatcccggtcttcgatgggcaatgtttcaatatttggttcctgttcctccgggatcggcgttcccggtacgggcggtaacgattccggggccgggttaggcaatccccagacgctccgcggttccggaatgggtgtaggcggtgtggtagagccgccagcgctcccgtcatggacagtcgtctggctggctccccactcaaattttccctgcccggcagaccgggaccagacaaatgttcctttaattgaaggatcttcaaagccccatgtctctttatccagctgttttgcaaaccgcacccggacccgatccagcccgcttttttcccccaccttatagctgcgggaaaccagttcccctgactcaggatcttcttcaatacgaaagcgcaccctcgtgcgcactgtgccattttgtcgggctatttcccggagttcatattccgggacataatccccctgaatgaccgttgagtttacgcgggtaaaagcgcccaccatcatctggccatggatcagattctgatagagctggtcgccacgtatatcttgtagcatttccgtctcaccttcattcagtgacggagaatagaagatagccagcagagcaacggtgaggggattaggcgcagccagcacccgtgcgcccgcgacgccttctccgacacctgccgcagtccccgcccctaatgaaagcgaatttcccagcgttgtggctgttggccctgcataataaccactcattgaggcagccagcgccattgattcaaaaaatacctgtgcgggtttacgttcaacaaccggctcttttgcggctgatgatgtttttccctctccggttcccagtatttgtgtcatcccggctttctcctgtccatggctcacagtagctctatttttattgattcaggcaatgcggtataaacgctggccgttttcccatcagcatctgcccggccttcgaatacctggcctttttcagtggtgatgcggtaacgggcaaaaagaacaatttcatcggtcttatgatcacattaggggagcagctcttcttaagaatgtggtcaacattgcgggaacagtacagagatcagggaatatgaattagctctgtaaaaaatcatcatttacaagcagtaaaacattaacgcttatttattcattaatctatttcgctctgacgcagcctgaattgcttctgcatgcgccaaagaataaaaagtcacactaacaacaaaaaggtcggcgtcataaacaaataaaacagcaatgttctgattaggtggtaacagtgggtatacctcactgataccacgactgtaactccccatagttttatggctcgccataaatcattgggaacccaaaacgctcacgcatccagttttgagtcattaccggttcaagattaaaaggcattgaattcggaaagacccagtctgttatgtcatcatcttctaatgttaatgtaattcctttgaaggttttatttttatcattctcgaaagataaaaataatccttctcgtttcgtatctaatgtagctgtatcatagcccactgtggcagttggttttgtcttatatttaattagcccactatcataaatttcctgataatctttacccaattgcttcacaagtgtttcgatatcaatattcatttaccaccaagtcgctttttctgtaacgcgacctgtatctctttggctcgctccaaagaataaaaagtgattttttttacaaaaaaatctttatcatatgtgagcgctgctgcaatatgctggttgggcattggtaaagcgtaaatttctttaacccccatataaatagtcataacaatctttgcctcaacatgaaccatcggcaagcctaaattctcacgagcccactgctgggtcatcaccggtttcagaccaaacggcatagggttaggaaataaccaatctgtcttaccctcatcttctaatcttagtgtgacttctttaagtttcttttctgaatcattaacaaagactaaaagcattccttcacgtctcatatccaggtcagcttcatcttcatcaataggaccatggggttttgttttataaggaatcaatcctttctcaaaaatctcctggtacggttttcctaagtgttttataagtgtttcaacatcaattttcatttagtacaaccccactcttctgtttaagtcatgcaattttgctctaacttcttcaattttttcatcacttatgccatatctttctttaagacacttagcattagcattccaattcgagtcaacggcaaattctaaatcacgagcatcaagttcttttttagatattgtctcaccattttctgtttctatcctactattattacgccctctgaaggtttcactacagtcacgatgtacatctatagggatagaaacgactgcaaccttaccaagtaatttttttatatcatccttttctgcttcaggatatttattaatcaaatattctctaaccgccgcttttgatggtaaatggtcaacctcgtacattccttctcttgacctcccatcaaagtcgttataataaccggtttctagaaatccggcaggagccttcttaaaatacacatagattgccgggacaccccccatcgggtcaacaataataaagtcattgaaatcccggtcttcgatgggcaatgtttcaatatttggtccctgttcctccgggatcggcgttcccggtacgggcggtaacgatgccggggccgggttaggcaatccccagacgctccgcggttccggaatgggtgtaggcggtgtggtagagccgccagcgcccccgtcatgaacagtagtctgactggatccccactcaaattttccctgcccggcagaccgggaccagacaaatgttcctttaattgaaggatcttcaaagccccatgtctctttattcagctgttttgcaaaccgcacccggacccgatccagcccgcttttttcccccacctcatagctgcgggaaaccagttcccctgactcaggatcttcttcaatacgaaagcgcaccctcgtgtgcactgtgccattttgtcgggctatttcccggagttcatattccgggacataatccccctgaatgaccgttgagtttacacgggtaaaagcgcccaccatcatctggctatggatcagattctgatagagctggtcgccacgtatattttgtagcatttccgtctcaccttcattcagtgacggagaatagaagatagccagcagagcaacggtgaggggattaggcgcagccagcacccgtgcgcccgcgacgccttctccgacacctgccgcagtccccgcccctaatgaaagcgaatttcccagcgttgtggctgttggccctgcataataaccactcattgaggcagccagcgccattgattcaaaaaatacctgtgcgggtttacgctcaacaaccggctcttttgcgactgatgatgtttttccctctccggttcccagtatttgtgtcatcccggctttctcctgtccatggctcacagtagctctatttttattgattcaggcaatgcggtataaacgctggccgttttcccatcagcatctgcccggccttcgaatacctggcctttttcagtggtgatgcggtaacgggcaaatggcacaatgtcaccggtcttttgatctttgacagtaaaacgcccttcgaacccttcaggcagttccagcggaggcacccgaaaatccgccttacccattttctgcacattggccgatttcagcagaatattcccagggcagcccagctcgatattgccaccacttagcctgatatacgctcccgcacaattcaccaccagttcctccgccgccgtgatttccactcgcccttccacgctggtcacggtgatatcctttttcgccgtcgcctccagcgcatcatcctgcgcctggatttcaatctttcccttcgccgcaaacagcttcatccccgcctttcgcgccagcaggctgacggcttctcccgccgccaccgtaaaacgtttcagcgcactaatgtccgtattctgctgtgacacaatccccacgcaggcgctacccgaagacaaccgtaccgcctgcggactgctgatgctcacgccctgcggcgcattcagcactatccccggctgcgccagctctttcagcgcatcgttcagcgtctgctggttgccggtatccgatggcagggcctgagccgattccgctgccgacgccaggcttttcgcaatacccagggcattttcaagctgcgcaatcgcctcctccattgccagcatcctgtcgcctgccgaaggctgtttatccgcactgataaacactcccgcaccgccccggatgctcacccatttatccgtacgcagttccgcaccctcgccccgcaactccctttgcgcattcacgttatgccccaggttcagctgcgtcttgccgccgtactcggtgctgagcttgatatgctcctcgccgcgcttgtcctccattcgcagcttattattggccggagtacgaatcacattgcgggtgctgtttttctccgtcacaggatcgacatgccgcgagtcgtgcagcgcatgcgcaatatacggccggtcagggtcgccttcgtggaaagcaatcgccacctccgtgccctggatcagcgggaagtgaaaaccgtacacgtcgccgccgtagggtttggcgagacgcaccggcatgctttcctgaccctgccctttctcatctctgtcagggtcaaatttcacccggtacaggccggacgcatcctgccaggcgtagatatcattcgctttcgcgctggtcacccgcgccgtcatggtgccagtcaccttcgggcgcggcagcagcggcggacgccagcacaatgtttcgctgtagggcaccgcaagcagggacacccgcagcgcctcccggcggctggcggtaaaaccggtgccggtgattaacagcggatcctgtacgggcgcaggcagggtcgacggcaggctgtcggtaacggtcagcacctgggccggcgccagccaggctgcagtactgatcgcggtaataagcgtctggtgagccagaaaacgctcatggtcgaggcgggcatagaagttggcggtctccgtctgcgggtcgattttatcgccacgctcccggtggcgaagcttatagtggtatacctcaccgtaagtgatgccttccccatttccccgggtcatatccgctgttgccgactggagaacgctctgcgcatcgcgggggttataatcccgggtagtgacgttcgcctctacgacattgtgcgtgatgctcagaccccatatcgattccgtaccgctgtcgctcatcccggacgggctgtttacaggaagtgttttatcgaacatcagcgcccgctgcgcgtcggcgaagtgaaccacttcgctctgcgcctcttcctgcagggtgaagaaataaaatatccccacctctgccagcaggcgctggataaatgccaggtcgctctcctgatactgattaatttgctcgcgccgcggatagtgttgcttgagattaaactcatactcccagtcatgcaggtgatgttcctgcaatacctgctccaccacctccggcaccgatttgttgacgaaaaaacggtggctgcgaaactgtttatccagtaaggagaggaagggttcgagggttatctgatatttcgactgatcttctgaactgctgatacgccggaaggcagtcaccacgccatggacgcgtttgcagtccgccagctgctgcagtgcgccgccgcccatcgtcagcatggcgggtttgctcaggagctgtgcggcatcaatatttttctctgcgctggtaaacgtaatagtgtaataataaagttcactcagtttttctgccccactgaattcttccacatccagcgatgcggtacatgaaggaatatccagctggtaacggttaagggtggtgccggtaattattgaagaggtatccattatattcctgttttactccgctgtaatgaccatcaaaaatcaattcacaggacgccctgtttaattttgtttaatgataatcatctcattcatcataaatatatttatgtgcatatcgatatatcagataccccaccaggagtttcgtaactaaaaggtaaccccagggatatttatattcactgactgagaaataaaaaaagcagccagaaaccggagccttcaacgtttatcgccgccagcatttctctgccactgtccttagcgctatccatactgatctcctttatccatcccctttcctgcgcttcatccccgcagaggccccgctttgccgacaagtttgactggctgcaggcacgctaccgcccatcgctgtttcctgtttatcagggacccgtagcgcacaaggtcaggcaggcagattgttgttcaacctccgcgatcggggtcgcggattactcggtttcgctttttaatccgttagtctctgctcctgaggtattggccgtgcccggcgtcagacaggcgtccttctgcgggaccagactgatctccacccggcgattttgcgcccgcccctctggcgtctcgttgctggcgacaggacggcttgcgccgtagccctgcaccgcaaaacagctctccggcacatcgccggtatcgcgcatccagtcgcggaccgcctcggcacgcttcagggagagttgttgattggatctatcgttgccgatgctgtcggtatggcctgccaccacgatcagccagccgggtttggccttaatgcccagcagcgagttcaccagcagctttgtcgaacccggtttcagcgtcgatttgccggtatcgaacagcgccatgctatcgaggcggatcgtctgcggcccctgcacaacctgcttaatgaccggacgcggcggcgggggcggcgcccagtcattgatagcggcttcaacgaaggggatcagccggcccccctgatacagccccagccgataacgcagcggctccccccggcgcaaccagtcatccagcaggcggctgtcggcacgcagacgctgctgcgcttgcagcttcggcgtcggcggcgtgccgctgaggcggtgatacaccgccagatgatcgccgacgctgcgcaccaggcgctggttgttgataaaggaagccagcatcgccagcgccagaaagaggaagcccaccccagcggcaagaccggcatcgcgcatccggcggctgaccccgtggcggtgcggcagtgacgacagaagaagatccggcagcgggtgaggacctggcgccgcgtcgttgcccggggagagcgtggtgatcccggcgatttgctgttgccagaggttattcgccaccgccgctaccggtgtcaggcagatgcccgcggcacacaggttcagcggaggaagttctgcctgccgggcgcggaatggccggaaaagagcgttttcggccaaggtcagaatgctctccagccacagcgtctgatgcaggcgtgaggcagagctgccctcccgctgccacccggcaaccgcctggggcgcttgtcccttcagctgcacctggagaccaggcctctccggcgtgatggtaaaccagcggctttccgcggcctggccgcctggcggcgtcacccagaacacgctccacaccggcggcagaccgtttagccaggttcggcactgaacgatactccgccgccagtcgcgcagcgactgcgccagatgctccccggaggggtggtgctccggtaccaccgccagcagcacggaaacctgcgataccagcgccggacgcgccgccgccaggtactgcgccagccgcggcaactgctccgcgctgtcaccccggagataccagccgtgacgggtttcgccgtgcgccgaacgcccgggaaacagaccgtcggtatccccgcagaccagaaccaccgccccctgaaaatcctcgggcggcaggacgatttccgatcgctgacggctgactgcccggcgacgctgacgccagagcgccgcgccgcccgccagcaggatgcacagactgaagatcacctggttgccgatggacagcggccagaagcccagcaccagccacagggccaggatgacggtcagtatcgtaagcagacgacgggcgttatcacgcatctcttatccctgccctgctatctgcgccaccatctgtgacagcacggaggagaaggtcaaccacagcgccgccagcgccacaatgccagccgcccagccgcaccagtacatccgccgtccgctgcgcagccgggaggcacgaaccaccaccggcgcctcctgggtcaggctgaacggcgggacccgcgagccaagcgcttgcgccacgtcctcacgccgttcgtcatcctcggcgcggtactgtccgacaaaccccagttgcaaagtacgatagaaacaagtcagcactgccgcatccgccgtgggctctcgcagcagctggcggatccgttcccagagctcttccccggcgttgagagtgctgaaaaagcgcgcctgcagcggatccttgcgccacctgcggtagccatcatcctgactggcgcggttgaggacgctctcatcgagcagcgcgcagtaggcatagagcatctgctcagcgctggcttcactgactccccccgccgtcagcgcctcgcgcgcttcggtcacccatcgacaggcctggcgatagagcgcctcgccatccgtcaccggctggccgcagcgtaactggctgaccatcagccagcccgggtaaaaagttttgttgatcagatcgctttcagaggtattcatgagcgcagtaccgcaaagagttcaagtttcacgtcgccaagcgattccggggtatagaaggtgcagttgccggcctccagcatcgcgcgggcggcatcggtggagagatccagagcgaaatattggttttccagacgtagcggaatggccgccggcacatggctcagcggtttgatcgcgatgccgctgagggcaatattgacgacctcggcgacatcatcatggctacccgccttacagagctgcggaaagcggctctgtagctggtgaggggggagtgaagagcgcaccgacagataaaaatccgccccctcgcgcagccgcgcatcgtgtagcctgccccgccagatctcccggtcggcgccctgctccagagcgatggcgatcacccttgagggcaggctgacttcgagcagcatatccagcagggcaaacagcggcgggaatacctgctctggcgaggcatgtcggtagcgggggattgcttccagatgatgttcaagggagaaagtcagcagactgccggccagcctggccagttcgcgatagagcagctccggatggcgcgaagggtcctgatgcagctcgctgagcaccggttcagcgctgttcagcgcgttgagcagccagaacagggaaacatccgccacggcaaaatcagccatccgcgcattgctttcacggcgcatggccatcaggcgtctgcgtcgggcctgcaggcgatgtaacagctcgcccagctcgctaaccagcgtcgggcttgccgccagcgacagcagcggcgggatgaattccgggtcaacgatccactgcccctgggcgtcgcgcaccagacgcgctaccgggcaggtgaggaaggctgcattttcctcggtggagagacgcagcgttagcgcgtgtcgcagaacggccagctcgctgcgttcatggccggccagctcctggacggtcacctgctcggcgcgccagcggcgcgggcgggcgctctcctggccgtcatcaagattgccgccgctggcgctgagcagcggcagagcgagcagaacctccacgctgtcctgcatcacgtccgatacatcgcggaccggtggcaaaatatccgccagctcggtgtcaatcagcgttccgtcggcgaaacgcacgatcagccgggtagcgttgagccgggaaagggtgagcgcgctcgcgtcaaactccgcgcgcaataccccccacgggtgggcgagcgccatgcgggagaccgtatcggcgacgtgcgcgtcccagcgggcctgttgctgaaactgctgcgggaccagaaaagccccgtcgcgccataatgggcggaaaatcttcattgcacctcctgtgcctttcactttcattggtctgcagacaggaccaaatgcccggacggatatccctcatccgccgtgtgttcggctggatttattacctgccgcttcagggaaaggaaatatctcccctgcccgcgagagtttcgaagttagatggtattttttggtcaagggatgtttatcataaagcgaaagagtcagggggaggtaacgcctggccctaaataatatctgaattcaacccaaggtagctttattgctctcggtcatcacatgtagaaggaatattccataagcggcccttttattattttcctgttgaatattaattagcgaattaatccctccgtcaggaatatttatatttaccttaaatataaataataataaaaatatcaccgcaatcgatataccctcagtagcgctgagtccagaatctcccccggcaactgccagatacccggaggagtgccccgcccccacccggccattgccaggcgctgcattaccccgtattttggtttcccgctccgctgtgggcgggtatcagggcgaacgagagagagaaaatgaaaccactatttgtctatgggacgctctgtcccggtcgcagcaatgcgcatattctggaggcgatcgggggcgagtggcgtcccggctacgtcaccggcaccttttacgcgcgcggctggggcgcagccgccgatttcccggggatcgtcctcgacgctcacggcccacgggtcaacggctatctgttcctgtccgatcggctggcggcgcactggcccatgctggacgactttgaggaggggtacgatcgggtgccggtggaagtgaccaccgacgatggacagcagatcagcgcctggatttatcagcttcagccccgggggtaatcccccgccgcgctgcgcggcatggtacagcagcccagcgcgatcgcgagtctggcgtcgtttctgccaatgcaggtatacttgccagatgtttcctcagtttcagacacgcagatgacaaaactcaccttacaagagcagatgctcaaagccggcctggtcagcagcaaaaaaatggctaaagtccagagaacggcgaaaaaatcccgcgttcaggcccgtgaggcccgggaagcggtggaagaaaataaaaaagcccagctggagcgtgataaacagcttagcgagcagcaaaagcaggcggtgctggcgaaagagtataaagcccaggtaaagcagctgatcgagatgaaccgcattacggtcgcccggggcgatatcggctttaactttaccgataataatctgatcaaaaaaatcatggtcgacaagcccacccagacccagctgattaacggccgtctggcgattgcccgcctggcggtggataacaagcccgaaggtgaatatgcgattattccggcggtagtggctgagaaaattgcccagcgcgacgccagcagcatcgtgttgcacagcgccctgagtcaggatgagcaggatgaagacgatccgtacgccgactttaaggtgcccgacgatctgatgtggtaaccccgggctttcccgccgcgggcgatcaaaacgggctcgcctgctggatatgcatcggctcatggctgacggggtggacaaagcgcagttcgctggcgtgcagcatcagccgcggagcctgttccgtgccgggcagctcccggccaccgtacagatcgcagccaaggatcggatagcccagcagctggcagtgaatacgcagctgatgggtccgtccggtctccggggtgagcgtcacccgggttaacgccagcgccctctcgccttctcgcgcctgatacaggcggtctatgacccgatagcgcgaacgcgccggtttgccgtggcgggcgcagagcgccatgcgcgggaaacgggccggatctttggcgattgccgcctccactatcccctcatcttccgccagatggccgcacaacagcgccgtatagaccttgtccaccgtgcgctggctgaactgttggcacagcaaggcgttaatgcccttgttgcgggcgatcaccatcaggccggaggtgccgaagtccaggcggtgcaccagggtgcagcccggatagcgctgtaccagccggtgatgcacggagtcgaggttgcgcggatctttgcccgacaggctcagcagcccggcgggcttattgatcagcaccaggtgttcgtcctgatacaagagggtgatctgttcgcgacacggcggcgcgacaaaggtatcgataatggtggacatcaggcggcccgaagaaggagtggctggcgatagtacctcattttgcccaccggcacgatgctggcgcacaatccgccctcgcggcggcgtcatttatcacccacacttatcgcaaaggcatggcctgtacaggcaatgtgctttacactgcgcgctgcaaaatttgtgttaaccaacgagtaatacggtaatggcgatgaacggaacaatcacaacgtggtttaaagataaaggttttggatttatcaaagatgaaaacggcgaaaatcgttattttcacgtgattaaggtcgccaatcctgatcttatcaagaaagacgcggcggtgactttcgaacctaccaccaacaataaagggctgtcggcctacgcggtgaaggtcattccggaaagcaaatatatctatattgccggcgagcggttgaagctgacctccatcaaatcctatgtggtgtaccgggaagaagagccggtcgagacccgcgtcgataaagaaaacgccgtgctgtcggtcgggctgctgatgaacagcatccggccaaaagccacggtgcagccgggagagatgcgctcggtgaaaaagctggcgatcaccacctttcaggggacaaccctgatcttttcggaagacgaaatcgatatcgatgccacggtaaaactgcttaaggtgtaagccctggcgcgcggtttcccgcgcgcccgaagtcctgcccgatatgctacccgccatcgcccctcgccggacggggcgatggcgccagagagccgataaggatgccgccatgcccgtaaattttgacttcaacgatctctacgcctttcgcgccctgatggaatatggcagttttcggctggcggccgaatccatctgcctgtcgcagtcggcccttagccgacgcatcgaaaagctggagacggcgctgggcaaccggctgttcgatcgcaccacccggcgcgtgaccctcacgctgtatgggcaaaattttgccgaacgttcggagcagctgctggcccatgtcgagacggtgctggcagatatcagccaggtcagcaaggcgcgcaccgggctggtgacggtggcgacagtgccctccgccgcctactactttatgccggaaatcatccgcagctttcaggcgcgttatccccaggtgcgcatccggttgattgacagcagcgtcgggaatgtgatcgaggcggtcagcagcggacaggctgactttggcctctgctttgccaaaaacctgccagccagtatcgaattcacccctcttgccgacgaccgctatgtggccgcctgtcggcacgatcatccgctggcgcgcaagacgcacctaagctggcaggcgtattttgaacaggattatattggcctggatcgggtctccggcaaccggacgctgcttgaccgggagctggcgcatctgacgccggcgcggccaagtatctgcgaaacccgccacgtcaccacgatgctggggatggtggaagcgggcatcggcattgccgccgtgcccgcgatgtcgatgcccgccggggagcattccgttctccgcgctgtgccgctcaccgacccggtggtcacgcgtacggtaggcctgatccgcctcagcggccgtattcagtcctacgtggcggcagagctggagaagctgattattgaacagtatccttctggctgaccggcgcggcggcggctacgcttcgcataccggtggcgtggatggtctcctgcgccgccggtgacgccagatacgtcagcagcgccttgccttcctgcgggtggtcggcgctgatggtcaccgccccggcaaagcgggtgatgtactgcaggttatccggcagttcgccgacgaaggttacgccgggcaccggcagcagttcgctcacctgctgaaaaccgatcgcataccgtcccttggccacttccgaggccaccggaatgcgctccaccatctgcgctttactctgcatcgcgtcatcaatgcccagggtgtggaacagcgtcgagctgacatagcgtccgctggcgctgtcggagtacgcgaccgatggcgccgccagcagcgtcgcccgcagctggtctgcgttgtggatagccggcagcggcgcccccgccttcaccaccacgccgatcggcgagtcggccagctcccggcgcgaatccggttgcgtacggcccgctttctcgaggctggtcagcgcgtccccgaccatgatcaccacgtccgcgtgttcgccgcgcgccagacggttagggatcgcctgcggcgtttttcccatcgacgggccagggatcaccacgaggtggttgccggtttgtttttcccacgccggggccagcttttccagcgccgctttgaagccgccggagatcatcacggtgacctcagcggacaacgcgctgccgccggtggcggccagcagcagcgtggctagcagggttcctgtcgttttacgcatcatcttctccctgattaacgtgccgtctgcagcgcaacggcgctacggcgatagaggtagcaagtggccagcagaccgcagatggcggcaaagctcatccagtagccgggagacgctttatcaccggtatactcaatcagcgccgtggaaatcaccggcgtgaagccgccaaacaccgcggtcgccaggctgtaggccagcgagaaacctgccacgcgcacttcggcgggcataatttcggtcagcgccgggatcatcgccccgttgtacatgccgtagataaacgacagccacagcagcacgctcagcatcatcaaaaagctcggggcgttcgccagcatggtcagcgcaggccaggcggtagccagcgccagcagggtcatggcgatcagcaccgaccggcggccaaagcggtcggacagcgccccgcccaccggcagccagaagaagttggaaatcgccaccagcagcgtgaccagcaggctgtcagaggcgctgagcatcagcacctttttaccaaaggtcggggcatagacggtgatcaggtagaacgcggtggtggtcatcgccaccatcatcatcccggcgataaccacctgccagttcgccagcagggtggcgaatacctggcgcatcgccagatgatggcggcgggcagtaaactcctgggtctcctccagcttacggcgcaggataaaaatgaacggaacaatcaggcagccgaaaaggaacggaatacgccagccccagtcgctgatagcgctcggctccagtaccgcgttgagggcaaagcccatcgcggctgccaccatgatggcaacctgctgactgcccgactgccagctggtgtaaaagcctttgcggcccgaggtggcgatctcggccagatagaccgacaccccgcccagctcggcgcctgcggaaaagccctgcagcagacggccgatcagcaccagcagcggcgcccacaggccaatggtctgataagaggggatcagcacgatcaggaatgtgccggtggccatgatcgacagggtgacgatcagccccttgcgccgccccaccttgtcgatataggcgccaagtacgatagcgccgatggggcgcatcaaaaagccggcgccaaagactgcgaaggtcatcatcagcgaggcgaattcactgctcgccggaaaaaaggtatgggcgatgtaggtggcataaaacccgaacagaaaaaagtcgaactgttcgagaaagttaccggacgtgacgcgcagaatggcgccgatccggtcacgggtactcatctgtgaggttgttgaatgcatgcaggtctccagtttgttatccacgcgttgtcgcgcgcctgtcgctgaagactgaaacagaaccgggaacgaaataagcgtaataaacgcatccactaatgcattttacgcatgaataacatttaactaattaacattacttttacatacaatcatttaacacacaccgacctaaccacgccgcgggtgacggcgaaaaagtcagttttccgttttgtgaccggggccaggatatgtcgccgtgggttgaaggcataaaacctggcctggggtaacgaaataccctgccggctggaaagcgcgtcaggaagcggtggactcccccaccagcgtctgcaacagggagataagccagcgggtagcctcgcgtttcccgctgcgttggtgggcgtaaatcttgacgtcaaacggcggaaccggaaacggcagcgggaaaatggtcagccgggcggcgcgggccatcgtctccgccgcccgccggggcagcgccatcaacaggtcgctctgctcaataataaagggcgcgctcagcatcgagggggttttcatcgccacctgccgcgaatagccctgtcgctccagctcacagtccagcaccccctgccgctcattccacggggtcaccaccagatgacgggccgcaaggtaggcgtccagggtcagcgccgtccggttggcctggctgatgaccacatattcgtcccgcagccagttaatctcctcaagatcgggatgggctggctcgtcaggggtattgaacccgagggccaggtcgacctcgcccgccagcagctcggtcagcgccgggctgtggggcagataacggagctcaaaccgcagcccgggcgcctcacgctgcaggtgatgcatcagcgtcggaaagacgcagaacgcggtgaaatcggtgatcgcaatctgcatgcagtcggtgctggcggccggcacaaacgccgccggcggcgtcagctcctggttgagaaacttcagcgccgaagcgatagagggcgccagctggctggcatagacgctggggcacatccggtggccttcgcggtagaacagcggatcgttgagggcgctgcgcagccgggaaagcgcatggctcagcgccgaggtgctcatcgccagctcttccgccgccaggcgtaccgagcgggagcgatagaccgcgtcaaagaccggcaacaggttgaggtcaatccggcgcaggacaggatgcataatattcatcgtttgctgatttcattgcacttaattcttttcacaataccgcttatcctcagggtcagcaattttgctctcttttgactatggatacaggacaccccatgagcatcacaatccgccaggccaccccggacgacgccaccgctatctacgacatgatttatgaactcgcggtctacgagaaagcccccgaagaggtagtgacgacgccagaggagatcagagagacgctgtttgccagcggcagcaaaaccgaagcgctgatctgcgaggtggcgggcaaagcggtgggctacgcggtgttcttcaccagctactccacctggcttggacgcaatggtatctatatggaggatctgtacgtcacccccgactatcgcgggatcggcgccggaaaagcgctgctgaaaaccatcgcgcaatatgctgtacaacgtcagtgcgggcgtctggagtggagcgtgctcgactggaaccagccggcgattgatttctatctgagcattggcgcgcagccgcaggatgagtgggtgcgttatcgcctcacgggagatgcgctgcgggcctttgcggagtaaagcggctcaccagcaggtcggcgccaggcgtcgacctgctggccgcggatcaggcttcgaccgcgctcttctgcagctgcggaccggccagcgccagacgcgcgcccgcttcggtatcgctgtactgcttgaagttatccataaacagctgagccaggctctcggccttctcctgccatttatccgctgaactccagccattacgcggatccagcaccgcgctgtctacccctggaatgctctgcgggatcgcaagaccgaacaccgggatggtctcctcgcgcagcgggccggtagtgccgttgaggatcgcgctaatgatgctgcgggtatcgcgcagcgacaggcgtttgccctcgccgttccagccggtgttgaccagccaggcttcggcaccggattccgccatcttcgccgccaggacgctggcgtactgggtcgggtgaagcagcaggaacgccgcgccatagcaggcggagaaggtcggcgtcggctgggtaatgccgcgctcggtgcccgccagcttcgaggtgaaacccgacaggaaatggtactgcatctgctcggtggtcagacgggagaccggcggcagaacgccaaacgcatcggcggcaaggaaaatcaccttcgacggatggcccgcgcgggacaccggcttgacgatattgtcgatatgcgacagcggataggagacgcgggtgttttcggttttgctgccgtcggcataatccacgctgccgtcagcgcgcactaccacgttttccagcagcgcattgcggcggatggcgccataaatctccggctccgcctgcggatcgagattgatggtcttagcgtagcagccgccttcgaagttaaacacgccgtcatcgtcccaaccgtgctcatcatcgccgatcagctgacgatgcggatcggtcgacagggtggttttcccggtcccggagaggccgaagaacagcgccacgtcccctgcttcgccacggttggccgagcagtgcatcgacgcgatgcctttctgcggcagcaggtagttcatgaccgagaacagccccttcttcatttcgccgccgtaccaggtaccgccgatgagctgaatacgctcgctgagattaaaggcgacaaagttctcggagttcatcccctgcgcctgccagttggcattggtgcagcccgcgccgttgagcaccacgaagtctggcgtaaagctggccagctcgtcggcgcttggcacgatgaacatgtttttgacaaagtgggcctgccacgccacctcggtgacgaagcgtacgccaagacgggtgtccgggctggcgccgcaccaggcgtcgatgacgtacagttttttgccgctcagctggcccgcgaccaggcttttcaggctgcgccacacgtctggcgataacggtttgttgtcgttgcggccgaggccggagtctgcccaccagacggtgtcgcgagtctgttcgtcgcggacgatgtatttatcgcgcggcgaacggccggtgaagatcccggtatcaacagccacagcgccagagtcggtcatcacgccgcgggccgcgccggtcagctcaggagaggtttcatgtgcaataagcaaatcgtaatcagggttgtaatagaattcgccgcttgcattaatccccagctcctgcagagccatttttactgattcaatttgttgtgacatggaactcctgacaaactatttaaggtaagaggcctgggttattcattgctttcgtcatcgtcgccggctatttaataagataagtcctggacaatgaaataaagcaataaataaccgtgagtcgcgatttcatatcgtgctcatgtagggtcgccgatatgcattcataaatctcaactttccaaaaaatgttaacacctgtcgataattatgttaattgcatagtttctatgcgctatgctaaaattgcatagcctttattgcgtttttgaggactggatcggtgttggcaaatctggaagtaaaatggctgtatgatgtgattgccctcgaggagtcgcgcagctttaccctggcggccaaagcccgcaacatctctcagtcctcgttcagtcgacgcatccagtcgctggaggcttccctcggattcagcatcttcgatcgtagcgccaaccctctgcagctgaccaaccgcgggaaaatttttgtcggctatgcgcgaaatatgctcgatgacatggattttcagatcagccgtattaagggtttaaataacactacccagaaaataagaatcgacgccgccccttcgctgtcggtgttattactgccggagatcatcgccggttacaccgaccgtaaaaataagacttttcatgttgaatcgattaacgtcaacgacgccgtatttaacctgaaagagggaaaaagcgattttatcctctccttctataatgaagaattaatgaactatccgtttattaatcataaaatttttgattcttacctgcacctggtctctccctgcgacgaacatggccgcccgctgtttcatttacatcgcggcgtgctgccgctgatgaaatacgccaacgacagctatatggggcgccaggtgaaccaggtgatcgatcgcacgccggagatcaccttctcccttacgtttgtctcttccatgagcgagctgctcaagcgcatgatcctcaatggcgacggcgtgggctggctgccgcagtactccattcagcgcgagctggacgaaggccggctgacgatcctcgatgagagcctgtcgctgccgatcggcgcctggctctaccgctccggctcgcggcttaaccaggccgccgaacgtttctggcagcacattaaaacccgtaacgaaccgcgggaataaccccctcagccgctgatccccagatatgccttacgcacctccgggtcgttgagcagcgtctggccgctaccgctcaggcggatctggccgttcaccatcacgtaggcgcggtccgacagattgagggcatggcgggcattctgctccaccagaaacaacgtcatcccctgagccgtcagctcgcgcaggatctgaaaaatctgcttcaccaccagcggcgccagccccaggctcggctcatccagcagcagcaggcgcggtcggctcatcagcgcccgggcgatggccagcatctgctgctcgccgccggagagggtcatcgcccgctgtccccgccgctcttccagccgggggaacagctggtacattcgcgccttgtcctcggcctgatagcggttgccaatggcaatggtccccatcagcagattctcctcgacggtcatatcgggaaagatgcgccgcccttccggggcctgggcgatgccgttgctggcgataaagtgggtcgacttccggctgatcgcctccccgcgatagaaaatctccccgccggcaatgcgcggctggccgaagaccgacatcagcagcgttgatttaccggcgccgttggcgccgatcagcgccaccgtctccccctcgttgacggtgagggagacctgcttcagggcctggatcggcccgtagaagacatccacctcattaaaggcaagcaaaggctggctcatcggcgcgtctcctcttcctcagcgcctagataggcggcaatcacgctggcgttggcctggatcgcctgcggcgcgccgcgggcgatgacgtccccgtgatcgaggacgatgatatgatccgaaatctccatcaccatccccatatcatgctcgatcagtagcaccgtgatgccgtgctgctggcgcagaaagcgaataatccggctcagcgcctgggtttccaccgggttgagaccggcggccggctcgtccagacagatcatctccggacgagtgcacatggcgcgggcgatctccagccgccgctgctgtccgtaggagagggtccccgccagacggttggcgcagtccaccatctccaccacctccagccagtaaaaagcgcgatccagcgcctgactctccgcctgccgatacccacgggtattgaggatcccggccagcagatggcggttgacctgggtatgctgggccaccagcaggttctcgatcaccgacatctcgcggaataaacgtatattctggaaggtgcgcgccaggccagcgcggttcaccagatgggtgccaccgaacatcttgtaatagatccgcctccccagctgcgccgggtggagaaaatcgtccgggtgaagcttctgccccagcacctgaataacatcggtgaccttttcccgcgcccgcagcacgatactgccccccgtcgcccgataaaaaccggtcaggcagttaaacaccgtggtcttgcccgcgccgttggggccgatcagggcggtgatcgacccccgctccacctccagattgacatcattcagcgctttgatgccgccgaaatgcatcatcagatgctcaacgcgtaagatgctgtcggtcatggcgcgactccttttcgcaacgcaaccccgctgcggctggtgcgcaccaggccgcgcggccgccagatcatcatcatcaccatcagcacgccgaacagcagcacccgatattcgtcaaaaccgcgcagcagttccggggtgaccgtcagaacaaacgccgccagtaccactcccagggtggagcccattcccccgagcaccacaatcgccaggatcagcgccgactcaaaaaaggtgaacgacgtcgggttaacaaacccctgatagctggcgaagaacaccccggcgatcccggccgtcgacgcgccgagcataaacgccgagagcttcaccagcacgtgattgagccccatcgcccgacaggcgatctcatcctctcgcagcgcctcccaggcgcggccgatgggcatccgcgtcaggcgatgcttcaccagcagcaccagcatcaccaccaggcacagcacggcgtagagaaagatgaatttcaggttggggttgtagctgacgtggaaaaactcatggatggggatgccgccatccttggcccggcgggtaaactcgaggccaaacagcgtgggggatggcaccggtacgccgttagggccaccggtgaagctcacccagttgttaagcaccaggcggataatttcgccaaagccgagggtgacgatggccagatagtcgccatgcatacgcagcaccggaaaacccagcaacgccccggcgagggccgccatcaccgcccccagcggcagcatcgcccagaagccgaggcccaggtactggtagcccagcgccaggccgtaggcgccgatggcgtaaaacgccacatagcccagatcgagcagacccgcgaggcccaccacaatattcaaccccaggccaagcagaacgtagatcagcccaagaatggccacggtcagcagatattttgtggcgagaaacggaaagacaatggccagccccaccagcagcggtattatccagcgcagccgcgagcggtagcccggcggccggacgtataccccgtcatccgccccctcaaagcgggcaataaaggcttttcccctgtggctctgcagcagcagactgagcgccagcctgccggccatcaccaccgccaccagaatcgccacccgcgcaggcgcgagggtaaaaccataccctttgagcaccacgccgacgatcggaccaaagacaattaacgcgcaaaggccggccagtacgctgtcgatcagcgcgttttggatagcccgcgcaggctggcgcgtaatttcacccataaagcctccttagaccttggccaccagcggacgtcccagcagcccctgcgggcgaaaaatcaggatcgccaccagcagcgcaaaggaaaagacatctttgtaatccgaattcaccagcccggcgaactgggcttcggccaccccaagcagcagaccacccagcatcgcgccaggcagcgagccgatcccgcccagcaccgcggcggtgaaggctttgatgccgataataaatccgatatagaagtcgaaggtgccgtagttcatggtcaccagcacgccggccagaccggccatcgccgcgccgatgacaaacaccagggagatcacccggtcggtattgatgccaaggatcgccgccatgcgccggtcctgctgggtggcgcggcagatgcgccccagccgggtatactgaataatccaggtcaggataagcatccccaccagcgccgcgacgagaataaacaccttggtccaggtgatctgcaccaccccatcgcccaccgtcatgcgcaacgcgccgctaagcagcgtcgggatcccctgctggttcggcccctggctcagctggacatagttctgcaggatcagcgacatcccgatagccgagatcagcggcgccagccgcgtcgagttgcgcagcggccgataggcgatgcgctcgatcgcccagccgtatacgccggtgaccacgatggtgaacaccagggtggcgaaaatcagcagcggaaaggagtggatcccgaagaaagagagcagcgccaggccgatggcgcacaggtaggcggagaccatatacacctcgccgtgggcgaagttgatcatgccgatgatcccatacaccatggtgtagccgatggcgattaagccgtacaccgcgcccagcgtcagcccattgatcagttgttgcagaaaaaacgccgtcatagcccctccagccgccaggcagacggccgccgggttccgttcccggtcaaccgccgtcatgtgacaattcgcaagtcaaaaggacagagcgtcctcaggtcgtggccgatcagagctggtgatatttgcccttgtcgtcccactgatagaccacgtagtcggacaccttgaggtcgcctttgccatcccaggctttcttgcccatcaccgtctcgacgtcgtggctcttcagccagtcgctggctttggcgttatcggtaccgacggcgttccaggccgcggcgatagcctgaatggaggcgtaggcgtagagggtataaccttccggctcaaagccgctggcgcggaacttctcgatcaccgctttgccgtccgggagggtgcgcggatcctgaccaaaggtcatcagcacgccgttggtgaactgcggcccgccggcggccgtgaccagctcctcggtgacgatacagtcgccggagaagaatttggcctgcaccccctgctcgcgcatctggcgcaccagcgggcccgcttccggatggcagccgccaaagtagaccacgtccggcttgagggcgccgatcttggtcaccagggcgttaaagtctttttcaccgcgggaaaggccttcgtacaacacttctttcgtaccccgcttcgccagcgccgcgcgggtggcatcggccagcccctgaccataggtgtctttatcgtggatgacggcgattttcttcgccttcagcacgtccagcatatagttggcggcgatcgccccctgctgatcgtcacgaccacacatgcggaagagatctttcatgccgcgctcggtgatctgcgggttggtcgagccgggggtaatggtcaggatcccggcttcgtcatatacctcggaggccggcatcgttgaggaagagcaaaagtgccccaccacggcggagactttcgcttcatccaccagccggttggccaccgccaccgcctgcttcggttcgcacgcgtcatccccctgcaccagcacaatcttttcgcctttgataccgccggcggcattgatatcggccaccgcctgcgaggcccctttccagtactgggcgccgtaggtggcgttgggtccggtaaagggcccggcgacgccgatcttcacgtctgcctgggcgtaaaaggccatgctcatacaacctgctatcacaacatgaagcgtcattgttttcagtttcaaagacattcggatattcctcagcgatgtaaagcctggcgtcatggaatgacgcagaaaatatcacttaccgtgtggtgccgacgttggcgcagcgccaggacggccagggtggaagaagcaaaaatcccgccaggaaggagtggaacaccggagaacagtcgccccggtcggtacgcacgcgacggcaacccgtgccgcatccggcaagggcgcattccctttcaggtcaggagatcggttgccatcacgtggcgagccggacaacgcggtatccgtaccggcccgtgagctaaacatagatgcagttagcggtcgctgcgcgccggcgtggtgcaaaaatgcgaatatgatcaacagtggtgattattttgttgcggtaatgtgaagatgataacaggagagcccgttaaaggctctcctgtgacccggtggccgctcagagtcggctggtgaacgttcgggagatcacatcctgctgctgttcgcgggtcagcgcgttaaagcggaccgcatagccggagacgcggatcgtcagattcggatactgctccgggtgttctatcgcatcgagcagcttttcccggttcagcacattgacgttgagatgctgtcccccctccaccgtctcctcgtggtggaagtagccgtccagcaggcccaccaggttgttttcctgagctgacggggctttgccgagcgccgccggcacgatggagaaggtgtacgagatgccatctttggcgtaggtaaacggcagtttcgccaccgaggtcagcgacgccaccgcccctttccggtcgcggccatgcatcggattggcccccggagcgaacggcgtccccgcccgacgtccgtccggggtgttgccggttttctggccgtataccacgttggaggtgatggtcaggatcgactgggtcggcaccgcctgacgccaggtggggagcgcctgaattttgcgcataaagcgctccaccaggtcgcaggcgatggcatcaacccgatcgtcgttgttgccgtactgcggatagtcgccttcaatgacaaagtccaccgccagcccgtggtgatcgcgcaccggcttcacccgggcgtactttatcgccgacaacgaatccgctgccaccgacaggccggcgatgccgcaggccatcgtgcggtagacgtcgcggtcgtgcagggccatcagcgccgcctcgtagctgtacttatcatgcatgcaatggatgatgttcagcgcgctgatgtactgcaccgccagccagtccataaagtggtcgaggctggccatcacggtgtcgtagtccagcacctcatcacgcagagggtcggttttcggccccacctggatcttcagtttctcatccaccccgccgttaatcgcgtagagcagcgttttggcgagattggcgcgggcgccgaagaactgcatctgcttgccgatcaccatcgggctgacgcagcaggcgatggcgtagtcgtcgctgtgaaaatcgctgcgcatcagatcgtcgttctcatactgcagcgacgaggtggcgatagagacccgggcggcatattttttaaacgccgccggcagcgcttgcgaccagagcacggtcaggttcggctccggcgccgggcccatggtgtgcagagtatgcagatagcggaaggtggttttgctgaccagggtgcgaccatccagccccatgccgcccagcacctccgtcgcccagatgggatccccggagaacagcgaatcaaattccggggtgcgcaggaaacgcaccatgcggatcttcatgatgaagtgatcaatgagctcctgggcctgctcctcattcaataaaccggcgcgcagatcgcgttcgatatagatgtcgaggaaggtggccgtgcgccccagagacatggcgccgccgttctgcgacttcaccgccgccaggtaggcgaagtagagccactgcaccgcctcccgggcagtgcgcgccgggtgagagatatcgcagccgtagcgggccgccatctcctgcatcagcagcagcgcgcgccgctgttcggccagctcctcgcgcaggcgcagggtggcctccagcgcctcgccgcgctcaagggccggctgcaggtcggcaaactgcagctcacgttcgcggaccaggtagcgaatgccgtacagcgccacgcggcggtaatcgccgatgatccgtccgcggccatagccgtccggtagcccggtcagcaccccggatttgcggcagcgcagcatatccggggaatagacgtcaaaaacgccctgattgtgggtcttacgcagcgccgtaaactgatactcaaagtcaggatccatttcgcgaccataggcctcgaaggcgcttttgatcatcttgatgccgccaaaaggatgcagggcgcgcttcagcggctggtccgtttgcaggccgacgatcttttccagcggctggttgatatagcccgccgcgtgggcggtgatggaggtggcgacattggtgtcgaaatccaccggcgcatgggtggcgttctcgacgcggatcccggccatcacctgctcccagagggcggtggtcgctggcgtcgcgtcggcgaggaaagactcatcgccctcgtaaggggtgtagttatgctgaataaagtcgcgaacgtcgatctgcgtttgccacgccgtaccgcgaaagccctgccaggcgtcggcgtatcgtacatcctgggtatcgatatctactttcatgaacatcgtctctctacagaataaaaagtcaggccagcgccgccgcggtgtggatccggcctaagcggatcgcatcgagggcaatcatgcgctcttcattggtaggaataaccgcgcagcgcacccggctgccgtcggcggagatcaggcgctcgccggccgaattgggctgctgattgcgggcggcgtccatcgcaaggccaaagaccgccagccgctcgctcaccagccgacggatcagcaccgagttctcgccaatcccgccggtgaaaataatgccgtcgagacgctgcagcgccgcggcgtggccggcaatatggcgggcgatacgatggacaaaggttttaatcgccaggcgggcgcgggcatggccctcatgccacgcctgctccagcacccgcaggtcggaggaaagaccggagatccccagcaggccggaggcggtgttggctacccgctccaggtcgctgagggtctgccgggtttccccggcaatccacgccatggcgccgaagtcgacatcaccgctgcgggtgcccatcatcagcccctccagcggcgtcatccccatcgaggtgtccacgctgcggccgttacgcaccgcgcagatcgaggcgccattgcccaggtgggcgatcaccaggccgctctcctgctccggcaacccgagcagcgccagggcgcgctgggacacatagcggtgcgaggtgccgtggaaaccgtagcggcgtaccccgagattctggtaatactcccacggcagaccatagagaaaagcttccggggccagggtctggtgaaagctggtatcaaagaccgccacctgcatcacctccgggaacagccgctgcgccgaggcgatgccgctgagactggcgtagttatgcagcggggccagggacgatacctggcgaatgttattgataacctcctcgctaataatgaccgactcggtgaacaggtcgccgccgtgggcgacgcggtggccaatcagggccacgctgtcgatgaggtcgcgttgggctaatgccccggcaatcgcctgcagggcgccttcgtagccgcgctgcgccagcgccaccggctcgccgccgttgagcgagagagacgcccgttccgcgttgatgccctcggccacgccgttgagcaggcagtcgcagctggcggcgcccaggacggaaaatttgatcgacgacgagccgcagttaatcaccagtactaccggaaattcagtcatgttgtactccgcgtggcctgagccggattagaacagtttgtaaacgatgttgaggatggtcagcagaccgatagcggtcacaaagaggttatcgagacggccacggtatttggccagcgaaggcgctttacgaatggcgtacatcggcagcaggcacagcagcgaggcgataatcggcgcgcccatggcctcaatcaggtcgaggatattggggttggcatacgccaccacccaggtcgagcccatgatgaacaccatgctcagggtattgagcttgccgctggagacccgggttttatcccctttatagccaaagcgcaggatcagaccgttcagcccttcgagcgtgccgagatagtggccgaaaaacgatttgaagatggccaccagggcgatgatcgacgcgccatactccagcagggtggcaaaggtggatttggtgcccgacatcgaggcaaagtggttcgccagataggagagcaccgggatattctgcgccttggcgtccgccatgttctgcggtgagagggtaaacaggcagctgaaggcgaagaacatcaccaccgccaccatcagcatgctggcccgggagatgatctgtgagcatttgcgttcggtatactcgcggccaaactgcgcttcatactcttcgcgtttggagaccacaaacgaggagacgatcggcgagaagttgaaggagaacaccatgatggagatgcccagccataccgtcaccagaatgccgtcgtgaccggttaaggcgatatcgctgaggttgacctggtcaatcaccgcgctattccagtaggggatcagggacagggagatcaccaccaagctggcgataaacggccacaccagatagctcatcaccttgaccatcaggtctttaccaaaccagatgacaaacgccatcagcagcagcaggagcagcgccaccaccccgcggttgagagccggcatctgcagctggttctcccagaaagtcataaaggtattggtgatcgtgacgccataaatccacagcagtgggcagatggcgaagaagtacagaaaggtgatcaccaccccgccggttttgccaaaatgctcttccaccgtttcggtgatattgccggaggggttagcccccgacaggcatagccgggccagggcccgatggcaataaaaggcgatgggataggccagcaccagcatcaccaggatcgggatcagcccgccgaagccggcgcggatcgggaaaaacagcaccccggcgccgatagcggtgccaaacaggcccagggtccaggtggtgtcagatttacgccaggacgaaaggcttgtctggctggatgcaatgctctcagtcgtactcatatcctgtcctcacttatgtattgaattaagcgtcaacaaaaccggtaatttgcgatacccgggagagatcgatattgcccccggaaatcagactgaccgttttgcggttctggatatagctgtcgagtttgccgcttaataacgcggcgcaggccaacgccccggccccttcggtgatcactttattgcgctgaattaaggcgaccatgctctggcgaatgtcatcctcactcaccaggacgatgtcatccaccagctggcgggcgatttcataggtcagtttccccgggcgggcgacgtcgcaaccatcggctaaggtgccggcgtggcgatggctggtgatttccccggcataccaggaggcggccatgccgtgaacattctccgactgcacgccgataatgcggattgtcgggttaatggatttaatcgcgatcgcgataccggcaattaagccgccgccgccaatgggcacgatgacattatccacgtcatacagatcttctaatatttcgagtccaatcgtcccctgcccggcgataacctgcgggtcgtcataggggggaataaaaatgcggccctcaagttcaacaatatcgctggctttggcgagggtatcgttaaagttatcgccatgtagcaccacttccgccgaataatcacaggtggcggcaactttcgatttcggcgcccctttcggcatcaccactttcccgtcaatgccgagcatggcgcaggagagcgagacgccctgggcgtggttgcccgctgagcaggccaccacccctttgcgtttttccgccgcggttaaaccgcacagtttattaaaggcgccgcgaattttaaatgaacccgtgcgctgcatattttcgaatttaagaaatatttcgccctggcagcgctcgctaaaataattcgaacggggcatgcctgttttatatatttttcccgcgaggcgttgtttcgcttcgagaatatcgtcaatagataccggaagatcgtaggtaatatgcattatggcctctgtatcttaatataaagtcaatgaccgggcgtcatcctgctgataacagcgaggacgtgtgttggattatttaacgactttcagttacgcaataatttgtaatggctgccagtggcggttgccctgccccgaggaatagtgtttcgccatctccaccagcgacgccgcggcggtttttaaccggtaatttttcgaccataccgccgcatagcgcgccaccggcaaggcctctttaatggggatggtgacaaactggctcgagccaaacggcgtggtcatgtcgcaggggatcaccgtcagaaaatcggcattgagcaccaggttatagatcgtcaccaccgaatcggtattaacgatattttcacggcggataccgctgcgctgcagggtggtcagcagttcgctgtagtagcccatattggtctccggcagcacccactgctcgtgctggagcgaggccaggcggacggtgccgttgccgatccgcgcccggttcgccaccagcacaaactcagactcaaacagcggctcgacgtgcaggtcctgcagtttcatctcatcgctcagcgtcccgatggcgaagtcgaggcgcccgtcgcggattgccggcaaaaaggcggagagctgcgcctcatacatcgagacccgcgccttggggaaagtcattttaaactgatgcaccatctccgacataaaggtaaacccgaccagcgaagggaaaccaaaggagacatccaccaccgcgctgttggtcagagcattcatttcattgaccatatttttcatttcacgggtgatcgcttctgaccagttgagaaatacctgcccggcctcggtgagcgagacgccggtatttcgccggacgattaattcgctgccaaaataactctccatgtcgccaataattttactgaccgccggctgagtgagtcctaacgcttttgctccggccccgattgacccgctgcggatcacttcctggaaaactaccagatgctgtgttttaggcagagaaaaagtattcatcgcgtctcactttcattcctttgttgacggcggaaagtgtaacaaatcgcaattgccgggttatgtgagagctctcacaaaggctccgccgcggcggataagcaggatccacgagccagaataagtaaagtaaaatcaatatattaaaagcatcatgaacgctatttgcgcgccttttgccgtggccgaatgcggggataaaaataattgatggcgataacatcgacggcgaaatggcgataaaaaatacgccttttgtacgttattcgacccgcgctatcagggtgagaagaaagccgaaaattaaattaatgctgtaaagaataaaaagcagacgtaataaacgccattatttaacgacaagccggtcgggcatcacattttatccccggcggttggggaaaatgcacggtcattatttacaccaaagaaacattaaattcacaatttttcttttgggtcgcgataggcagcgatcttttttccgccatagcgcagttggtcatactttgattaaaatcaaccctggtaatttatcttttacgacggccattggatagtcatttgtgttgccgatcacaaatccataaaacaacgacccggcctatcgtgaagagatgatcccgcggctgcgccagcagcttaacgagcagctgatgagcgaccagctggctgtcgacctgctctcttcctatctgcgaatggatctcagcgcccagccgtgggaccagccgctatagcccgccccggcgcagatcgctggcccaggcatttcgcctatagctggctgacccccagcgccgcggcctcatcccgccacgccagcagcggcgcataggcctcccgcgacatatcgctatagccgcagatcagcaaggcgtcgcacagggaacgatagcgcgcatcgctcactaactgctggagcgcctcgcgcaggctattcagcgtcgccgccggggtggcgccggcggtgatcagcggcagccctggcgcggccgggctccagccgatcgccaccaggccagccagagcctgcggctgatggcgctgcagcagcgcgtaggtcacgcagtcgatggcggcgatatcggcgttttcctgctgcagttcgcgcagcgactgccgatggctgccgctgaacatcaccgctgaaaaaaaacgcccctcccgggagagcggcgcgaccattttacgcagtacgttgtagccggactgcgagtgctcggcattgcacaccgcccgacggccaaaaaagtcccccagcatccggtgactatccgcttcgcggaccaccagcaggctgcgatagcggcgcccttcgcaaccgggcgcagcgtagtggaagcagcccaccgtctgcacctccggcaattgggtcaccagcgggtagccacaggtctggctcagcaacagcgtcggctggcgccagtgagccagcagatccccggggtcagccgccggagggtcccccgccaccatcacgccgcgttcgtccagcagcgactgcaccgtctgccacagggcctgggtctgttgacggtggatggcatacatcggaaaggtcatgcgttcagccatgttctcctcccgcctgcgcctgctcgccaaagcccggatgggcattcaccgccaccgcccggcggctaaaatggcgtcgccactcgccgtacccgcgcaccaggaacccctgattacgctgcagatacgccgcctggcgatgcagatacagttgacgtaaagcgtaccaggggacccctggcagatcatgatgcaccgcatggtagttgagattgagaaacagcacccgccaggggagcccggcctcgttgatcaccgagcgggccagcgggtcatccgcggcgcggtgttcgagaaaagagcgtactttggtcagggccagcgccgggtagctcaccgccagcacaaaccacagcggagaaaaaccctgcgccgccatccaggtcagcaggcccgtcagcagcaacagatgcagactccacatggcgatagcgcggcggtcgccctcgcggaaagcccgcagcgcgctgttcagggtgtgaataatatccatcatcggcgccagcagcagacgcccccagaaggtgttgcgcaggtggataaggcggcgctgccaggctgagaagcgctgccagctttccgccgttacgtagtacgattcggggtcatcctcagggtgcgtcagcagatggttgcgatggtgcgccaggtggctgtcgcggtagacgccatagggataccagaccgccagcggcagcgtccccaacagctggttaaaccatgccagccgggtgggatgcccatggatcagctcatgctgtaaggacatataccaggcggtaaaccagatcaacagcagcgtggccggaaacagtcccagcgtccgccagcccgccacgcaggcaaaccagccgccgtaaaccgtcacaatcagcagccaggtcggcagctcgctgcgccacagccagctgcgcgccagctggcggatcaggatgcgctgttggtcatccacatagacagccgtcttcttttccgtcacttccgataccttgccgtgttgcctcattcccaccgaagatgtgagataacacgttaaataacaaagtatttaattgacttagctttgccaaaaagcgcgtttgtgttcaacagggcaaagagaataccgtccatggcgcaacaggttggcggtgtttaaacaggcccatcgcccggcggcgctgcgcttgccgggcctacgggataacccctccccgggccatccaggccggtgcaggcgcagcgccgccggacaagaacagcggcgtcgcttttgtgccgggcggcggcgacaccttgcccggcctacgatccgtgcggcctgtcgttaatttatttaccgctgttgctgaaattttaccgccaggtcgaggatacttaaggactccagcgccttacccgccttcgcgccgacgatgccggcggagcgtcacagaggctactcctcttcccgctccgctggcgtccaggtcggcagagtctggaaggtgtgcaataggccttcggaccacgccttgcgaatgcggttgaagtagggatcgctgtcggtaatgcgatgctgcccggcgctgaagctgccgctgcggtagagcagcgtatccagcggcaggccgacggacagattactgcgcagcgtcgagtcaatggagatcaacgcgcagcacatcgcctgctccagcggcgtgtcgatggtcagcacccgatcgatgatcggtttgccgtatttgctttcgccaatctggaaataaggcgtgtcgcgggtggcttcaataaagttgccctccggataaatatggaacagacgatgggtttcgccggcgatctggccgccaagcagcaggttgcagttgaagttggtgttactgcaggtctgctggttgctgctgtcgcgctggatcacctccagcagcgttttaccgatcagcatcgcggcgtcgtagagggaagtgacctgcatcagattcggctcctgctgggtacggatgcgcgcgctgagcaggcttatcacgctctgggtggtggccagattgccggcggattgcagcaccagcacccgttccccctcctgatggaaaacgtgcagctttttaaaagtggcaatatggtcgacgcccgcgttggtgcgggagtcggaagcaaacaccagtccatccgccaggcacatggccacacagtaggtcattgcggttattcccgtattattgctgctgcgcctgctggctgtgttcgcgcacttcagcgttagttaacataatctccccgccgccgcccagccgggtgccccgtaccgggcaggcgtcgagataatccagcccggtcgccagccgtaaatgctgattcaggcgacgggtattattggtgatatcaaacgacagccagcggccgtcgagccagacttccgcccaggcatgcatcgccacatgctgggcgttatcgctgtagacatagccgctgacgtagcgcgccgggatctccagcgcgcggcagcaggcgagaaaaacatgggtatgatcctggcacacccccttcgcgcgggcgaaggcgtcggcggcggagtcctgcacctgggtcgcgccgggggagtatggcattcttaacagcagatccgccatcagttgattcagactctcttccgccgcatcgggacgatagaggcgctgggcaaactcacggatcgccgtatcggcgcgggttagcggcgtacagcgcagaaaaaccagcggcgacagcagctcggcctcttcatcacgcgtctcctccccttcgtcggcgatatcgacaatcccgctggcgcggatggtgatctccttgtgcgggttatccagcgtcagcacatgcagcacattgccccagccgtcggtagtggtcaccgccgcgccgtccggcagggtcagcgtccaggcggtgatcgtctgccgggcggtactgcgcggcgtcaggcgcagatactgggtggaaaacttcacttcttcatcgtagccatagcgggtgagatgatcgatgaccagtttcataaggcctccagataggtttgtctgatgctgtcggacagcgcgttaattctcgccagcagcccgttaagggtggtctgcaggtccgcctgcgccaggtcgtcacgggtgctgaagcgcagatcaacgttaagctgatgggcgaggcgcagcggttgataggagcggtcgttagcgatcttctccagctcgcccaccagatcggcaatgctggcgcgcagcgaacgcggaatatcgttgcgcaggatcagcagctccatcaccgtttcgcgactgaccggctggcggtagaggctgttgtaggcttcgcgggcgctgaccgcattgagcagggtatccagccggtagtattcccgcaccggatccgggtcgttggtcagctgttgatccttaatcagcagcagctgggtggtggcgaacgcgcgctcgatcagcgtgccgataccgataaaactcagggcgtcgttgcgcagcagcgtgccgatcactgccccgcgaaacagatgcacccgctctttcacccactcaaaaaagccgtcgctccccagctcgcccagcccctgctggcggagggtccgcagttcaatgcgggtggcattgatgctctcccacacttcggccgacagactgccgcgcaccgcgtgcgcgttgttccacgccatctccacgcagctgtaaatactgcaggggttgttgccatcaagggcaaaaaagttgagcagattgctcatggtaaagcgggcatggcgcgcctgaaacaactcgtgggtcatcgacaaattcagcggtagcgccagatcccgcgactgctggctgtggcgggggatcattgataatttccaggtcacgtccagcacccgggcgtagctctccgcccgctcgagatagcgggccatccagaacagttcactcgccgtacgacttagcatgatgcgtcatcctccatcacccaggtatccttggttccgccgccctgcgaagagttgaccaccagcgacccttcggtgagggccacgcgggtcaggccgccgggcaccagccgcatctcctgcccggacagcacgtagggccgtaaatcgatatgtcgcggcgatagaccttcctcaacgaaggtggggcaggtcgacagcgcgagggtgtcctgggcgatatagttggccggattggccagcaggcgctggcggaaggcctcccgctcctctttggtggaacgcgggccgaccagcatgccgtagcccccggcgccatggacctccttgaccaccatcagctcgagattgctcagcacgtagcgcaggtcctccgctttccggcactgccaggtggggatattgctgaggatcggttgttcgccgaggtaaaagcggatcatctccgggacgtacggatagattgatttgtcgtcagccaccccggtgccgatggcgttggccagcactacgccgccggcgcgatagacggacagcagccccgggacgccgagcatcgaatcggcgcggaaggccagcgggtcgagccaggcgtcgtcgatgcggcgataaatcacatccacccgccgcggcccctcggtggtgcgcatatacaccgcgccgtttttaataaacagatcggcgctctccaccagctcgacccccatctgctgcgccaggaagctgtgctcgaagtaggcgctgttgaagcgacccggggtcatcaccacgacgcagggatcatccaccagcgagctttcgcgcagggtctgcaggaggtagctcgggtagcgctccaccggcgcaatgtgatgctgctcgaacatctccggatagagacgcatcatcatcttacggttttcgagcatgtaggagacgccggacggcgtgcgcagattatcctccagcacgtagtactgaccgtcgttattgcgcaccatatcaacgccggtgatatgggcataggtattgtttggcaggttgatgccctgcatgcacggctgatactgctcgttggccagcacctgctcggccgggatcagccccgcgcgcaggatattctgctcatgatagatgtcatagaggaaggcgttcagcgctttcacccgctggcgtatgccgcggtcaatgcgctgccactccccggcgggtatgatccgcggcacgctgtcaaacgggatcagccgctcggtcccctcatcctcgccgtacacgttaaaggtgatgccgatacggtgaaaaagcagttccgcttgcgcttttttctgccggatagagaattgatcggtattgcgaaaccattgccaccaggcattatagtgcggccgctgttcaccctgcgcggtcagcatctcgtcataataatgcccgtcaggtagcgtaattttaatcatggctatcccctccggttgtactcactttgtggtaatcccgctaagagataagcattaattatgccaggtcctctgccgccgcggcgttgtgcaaatcggttcagccccgccgtctggttgtgcaaaaaatcgccaaaacagccgcccgcgcccggcggcggctgcaccgtcgtgaggcagggcgacgttttttgcgccatcgtggacgccagcgccctcagccaggcggcccagcccgcggcggtctcaggagacctggcaggtaaatcctctgttttcgcgcaaaatgttacccctgacacgcgcagcggcagatattcgtctaaggtttttggatggccaaacgtcgtggcccgcagtcgataatgataaggagaactccccatgacgagtactgatgcacgtcgtcccgctgctttgccctgttccctgcgcctggcgatcggcggcgctctgatcgccctgatgagcctgaacgctcaggcggaagacggcaaaaccgcgccgcccccctcgccggatattctgctgggcccgctgttcaatgatgtccagagcgcgaagctgtttgccgatcagaaaaccttcgccgacgctatccctaacagcgatccgctgatgatccttgccgattaccggatgcaaaaaaaccaggccagcttcgacctgcgccacttcgtcgaactgaacttcacgctgccgaaagagaacgacacctatgtgccgcccaaagggcaaactctgcgtcaacatatcgatggcctgtggccggtcctgacccgcagcaccgtcgaggtggaaaaatgggactcgctgctgccgctgcctaagccctacgtggtgcccggaggacgtttccgcgaagtctattactgggacagctatttcacgatgctgggtcttgccgaaagcggtcactgggataaagtcgaggatatggtcgccaacttcgccgcagaaattgacgcctggggccatatccccaacggcaaccgcacctattatctcagccgttcgcagccccccttcttctcctttatggtgagcctgctggcgacgcacgatggcgaccaggtgctgaaaacctaccagccgcagctggagaaagagtatcgctactggatggccggagcggacgcgctgcctcccggcagcgccgacaaacgggcggtgcggatggcggacggcgcgctgctcaaccgctactgggacgatagcgacaccccgcgtcccgagtcctggcttgacgacgtcaaaaccgccaaaagcaacccgaatcgtccggcaaccgagatctatcgcgacctgcgctccgccgccgcctccggctgggatttcagctcccgctggatggacaatccgcagcagctcgccaccattcgcaccacctcgattgtcccggtcgatctcaatgccctgatgttccatctggagaaaaccctcgcccgcgccagcaaggcatccggggacagcgctggcgctacgcagtacgatgcgctggctaacgcccgccagcaggccatcgagaaatacctgtggaatgataaagagggatggtacgccgactacgatctgaaaagccacaaggtgcgcaatcagttgaccgcggcggcgctgttccccctgtacgtcaatgccgcgtcacgcgagcgggcgacgaaagtggccgccgccgccgagtcgcgcctgcttaaacccggcgggctgaccaccaccaccgtcaacagcggccagcagtgggacgcccccaacggctgggcgccgctgcagtgggtggcggtcgaggggctgcaaaactatggtcagcagaagatcgccatggaggtcacctggcgcttcctgaccaacgtgcagcatacctatgacagtaagcaaaagctggtggagaagtatgacgtgagctcgaccggcaccggcggcggcggcggggaatatccgctgcaggacggctttggctggaccaacggcgtcaccctgaagatgttggatctgatctgcccgcaggagaaaccctgcgatgcgctgcccgctacccgtccggcgacaaccccttcaccgcaggacaaacctgttgcggcgcccgcggctaacgaccccgcccctgcggaaccgcaaaagactggctcctgacgctttgccgccccccctaccaaaatcggtagggggaagcggtctccctggtcactaccgtcccgtgcagacccattctgcggctcgcgggaaacacttccccaccccctcgcgttgaacaggtcaccttttcgcttgatcgcacaaatacaaacaataataattcgcattactttttaacgaataatgacagattcgtttttcacgcggcggcgtacaggagtaccagaccgcgttggttcaggatgatcttatgaacgtggctatttctcgaaaacgcccggggctgctgtatgcccttgcggtcgcactccccttcaccgcgcaagccgaagagacggtggtggtcactgccaccccgccggcgtccgccagcgcgccgacggagggctacagcgccagcacctcgctcggggcgacgaaaaccgaccagccgttaatcactaccgcccagtcggtgtcggtggtcacccgccagcagattgcggatcagggggcgaataccatcagccaggcgctggaatataccccgggggtctactccagcttcggcggcggcgccacccggttcgacgccatctccctgcgcggctaccacggcggcgacgtcgataacctgttcctcgacggcatgcgcctgatgagcgacggcggcagccataacgtattgcaaatcgacccgtggtttatcgaacgcgtggatgtgatccgcggcccctcctccgcgctctacgggcagagcgtgccgggcggcgtggtcaacctgacttccaaacgtccgcagttcagtcagcagggccacatccgcctgaccggcggcacgcaaaataccaaaggcgcggccttcgattacaccgacgccatcaatgaccagtgggcatggcggctgatcgggatgacccgcagcagcgacacgcagtatgaccatacccgcgaagagcgctacgcgatttcgccttccctgctgtggcagccggacagcgacacctcgctgctgctgcgcgcctatctgcaaaaagatccttccggcggctaccacggctctttgccgctggacggcacccgctacgcgcacaatggccgtaagctctcccccagcaccaacgaaggcgatccgggagatggctatcaacgccgccagcagatctacagctatgagtttgaccaccagttcaccgacgtctggtcggtctattccgccgggagctacacccataccaacgtctccctcgatcaggtctaccaggtcggctggatagatgacagcgacatgctggcccgcggctacagcggttcgcgcggttcgctggacggctggtcaaccgataaccgcctgcgcgccgatttcaatacaggcgacctggcgcacaccctgatcctcggcgccgaatatcatcggttccgtaacgacctgtggaccggcgccggcggcgcggcgccccttaacccgtttagcggctataccgcgcagaccggacataccgttacctacagcgacgacaataatcgccgctattaccagaccgggctgtatctgcaggatgagatggtctggaaccgctggcatgtggatgtttccgcccgctacgaccgcatcgtttcccagcaggtcagcgatacccaggggacctcaaaccgccgttcagacgaccatatcagcggccgcgcctcgctgttgtacgccctggacaacggtctgtcgccctacctgagctacagccaggcgatcaccccggcgatgctgccgggcgcggacggcaaaccgttgaaaccgaccaccgccgaacaggttgaagccggcctgaagttccagccgccgggcagcagcgatctctatagcatcgcgatttacgacctgacgcaaaaggatgtcgccactcgcgacccgaatatcgccaccgccacctatattccggcgggtaaggtccattcccagggcgttgagctggaagcgcaccaccagatcaccccgcagctgagtactatcgcctcgtatacctggaatcgtctgcgtttccaggacactaaagacgggaccgacaataacacgccgcagctgaccccggatcagatggcctccttctgggcgcgctatcagttcccggcggggatctccgttggcgccggcgtccgctacatcggtaaacagtgggcggatgatgccaacaccgcgcggctgccgtcggtcacgctgatggacgccatgatgcgggccgacctcggcgtctggtcgccaacgctgaaaggcgcttatgtgcaggttaacgccaacaatatcggcgaccgcgagtatatttccggctgctatggcaccggcaactgttactggggagcagagcgcagcgttatagccaccgtgggctacgatttctgaggacgtggcctccgggagactaccggaggccaaacgagggattacatggcgtccagcgctttctggagtttccagatataacgcggcgcctgcggtgccgggtgttttttcaccacatgttcgaagaactcatcggcgtcgagatcgttaatctcctcgatggcgtcctggcggttcgaggagaaggtacgcagcagcgcgccagcgccgttggcataggagaccaccaccgcatagcgcatcacctgcgggtctttgatccccgccagcggaccgttctccagaatgctcagataggcggcccccatcgagatattacgttccgggtttttcagctcactgaccgacggctcgccgcgccaccccatccgccgatagacatcgcgtccggaggtcgacggcttgagctgcatcagcccgacggcgccggatttactcaccaccgcaggattaccgcccgactcgatggcgatgatcgccgtgatcagctgcggatccacgccccaggcggcgccggctttttcactgatcggcatccactgcatcgcccgcttcaccgggacctcggggttccacggcgggttagtgtaatcatgtttcgaactacaaccggccagaaaaacgactaaaataagcaaccatctcaatttcacacatctatccttatctacccaaacgccatcatgctacagaacgacggccgcggtacatctcccgcctgccgacaacctgaaggatgacgggtgcggactgaagttagccacctggagatgacaatcgccattccaggcggcatcataaccctttcattcatagcaaggaattatcatgtctcagttttatctggtcgcgccatccgggtattgcatcaaccagcaggcggcagcccgcggcgtcgagcgtctgcagcaggccggacacgaggtggcccaccagcaggtcattccccgccggcagcagcgtttcgccgggactgaacatgaacggctggccgatattaaccagctggcccagttgcccggccgcaaccggatcgtcctcgccgtgcgcggcggctacggcgccagtcgcctgctgccgcatatcgactggcagggactggttgcccgccagcagcgtgacccgctgctgatttgcggccacagcgatttcaccgctatccagtcgggcctgctggccatgggcaacgtcatcaccttcagcgggccaatgctcgccggcaacttcggcgcggagaccctcgacccgtttaccgagcaccatttctggcaggcgctacgccagccggaattcaccctcgaatggccgggcgaagggccgaactgccgggtggaaggcaccctgtgggggggaaatctggcgatgctgacctcgcttatcggcacgccgtggctaccggcgatccgcgacggcatcctggtggtggaggatatcaacgagcacccgttccgcgtcgagcgcatgctgcttcagctgttgcacagcggtgtgctggcggcgcagaaagcggtgatcttcggcagcttcaccggcagcgcgccgaacgactatgacgcgggatacgatttgccgcaggtctttgattatctgcgccagcagctatccctgccgctgattagcggactggagtttggccacgagcagcgcacggtgaccctgccgctgggcgcccgcgcgcgcctggtgaatcaggcggcggccaccaccctgacgatcggcggccatccggtgctgacagaataaatttcccgaacgcataggcggatcccctgcgaattgttaaaatagtgtcacttttagccattttttcacgccagtcagggagtacgtgaacattggacgccgctgcggtcattagtctgtttattctgggttctgttttagtaacctgcagtatcttattgagctccttttcttcgcgccttggcatcccgattctggtcatctttctggccatcgggatgctggcaggcattgacggcatcggcggcatccccttcgacaactaccccttcgcctatatggtgagtaacctggcgctggcggtgatcctgctggatggcgggatgcgcacccaggccagctcctttcgcgtcgcgctgtggcccgcgctgtcgctggcgacggttggggtgctgatcacctcggcgctgaccgggatgatggcggcctggttgttcaagctggatctgatcgaaggcctgctgatcggcgccattgtcggctccaccgacgccgcggcggtcttctcgctgctcggcggcaaggggctcaacgagcgcgtcggctcgacgctggagatagagtcaggcagtaacgacccgatggcggtcttcctgaccatcaccctgatcgaaatgatccagcagcaccaaaccggcctcagctggatgttcgccgtgcatatcattcagcagttcggcctcgggatcgccatcggcctcggcggcggctacctgctgctgcagatgattaaccgcatcgtgctgcccgccggcctctatccgctgctggcgctgagcggcgggatcatgatttttgccgtcaccacctccctcgacggcagcggtatcctcgccgtctatctctgcggctttctgctgggcaaccggccgatccgcaaccggcacggcatcctgcagaacttcgacggcctggcgtggctggcgcagatcgccatgttcctggtgctgggcctgctggtgacgccctccgacctgctgccgatcgctatcccggcgctgctgctgtcgatgtggatgatattcattgcccggcccctgtcggtgtttgccggcctgctgccgtttcgcggctttaacctgcgcgaacgggtgtttatcagctgggttggcctgcgcggcgcggtgcccattattctcgcggtgttcccgatgatggccggcctggacaacgcccgcctgttcttcaatgtcgccttcttcgtggtgctggtgtcgctgctgctgcagggcacttcgctgtcgtgggcggcgaaaaaagccaaagtggtggttccgcccatcagctggcccatctcccgcgtcgggctggatattcacccggaaaacccgtgggagcagtttgtctaccagctgggggccgataagtggtgcatcggcgcggcgctgcgcgacttgcacatgccaccggagacgcggattgccgcgctgtttcgcaacaatgtcctgctgcaccccaccggcagcacccgcctgcgggaaggcgatatcctgtgcgttattggtcgagagcacgacctgccggcgctgggcaaaatgttcagccagtcgccgccggtggcgctcgatcagcgctttttcggcgacttcattcttgatgctgaggcccgcttcgccgatgtggcgcaaatctacggtctcgacggcggtgaggagttccgcgagcatcagcagtcgctcggggaagtggtgcagcagctgctgggcgcggcgccggtggtgggcgaccaggtggagttcgccgggatggtgtggacggtagctgaaaaagagaacgatcacgtgctgaaggttggggtgcgggtcgcggaagacgaggcggagtgatccgccccggaataggttacagggtcacaactggcacccgcggcgccagggcgcacatcagctcatagccgacggtgccgctgctggccgccacgtcgtcgattttaatctctttgccccacagctcgaccggcgcgccgatcccggcctgcggacaaggcgttaaatcgaccgccagcatatccatcgatacgcgtccaacggtggtggtgcgtacgccatccaccagcaccggcgtgccgctcggcgccacccgcggatagccatcggcatagccgcaggcgacgatgccgatccgctgctcctgggtggtgcggtacaggccgccatagccaatcgcctcgccggggcgcaggttctgcacgccgataatctcgctgcgcagcgtcatcaccggcttcagcccggtgttggcgatgtcctgccactgcccggaaggcgacgcgccatacagcacgatgcctggacgaacccagtcaaaatgcgcttccggatgccagagggtcgccgccgagttggccagcgagcgcgggcaatccagcccctccgccgcctgttcgatacggcgcatcggctcgacaattccctgcgggttctccgcctccgcgaagtgcgacatcagcgtcatctcgccgacgttgcttatcgcccgcagctgctgccagacggtgtggacccgctcaggcataaagcccagccggttcatgccgctgttcaccttgagatagatatccagcggcgcgcgcagcttcgcctgctgcagggccttaatctgccagttgctgtggacgctggtggttaaacgatattgatccagcaccgccagctcatcggcatggaagaagccctccagcagcaggatcgggcctttccagccctgctcgcgcagcaggatcgcctcttccaggttgagcaaggcgaaaccatccgccgcgcttaacgcactccatacgcgcgccacgccgtggccgtaggcgttggccttgaccaccgcccacaggcgcgacccgggggccgcgcgacgcactatctgtaaattctgccgcaaggccagcaggtcgatgctggccactaccggacgggtcatgcaagctccttagttgtgtgcgccgtgcaggtgctgcgggcgcgccggggtaaaaccggggctgtagcgggcaaccgccagatcgtcgtaagggatcgccggcgtgcggccggagatcagatcgctgataagctgcccggagccgcaggccatggtccagccaagcgtgccgtggccggtgttgagccacagatttttatacgctgtgcggccgaccaccggcgtgccgtccggcgtcatcggccgcaggcccgtccagaacgtcgcctgctccacgtggccgccgcgcgggaacagatcgcgcaccaccatctccagggtttcgcgacgcggctgcagcagcgttttgttaaaaccgacgatctccgccatgccgccgacccgaatgcgctgatcgaagcgggtgatggcgattttgtaagtctcatcaaggatagttgaaaccggcgcgccgtcctcctgagcgatcggaatagtcaatgagtagcctttcagcgggtagaccggtatatccaccagccctttaagcatcgccgtcgagtaggagccgaaggccatcacataggcgtcgcccttgataatctcatcgccgcatttcaccccggcaatgcgatcgccctcgtgcagcagcgcatccactgcggtgttgaagcggaaggtcacgccggcctgctccgccatcgccgccaaacgggtggtaaacagctggcagtcgccggtttcatcatttggcagacgcaggccgccggtcagtttgtggctgacctccgccagcgccggctccacctccgccaaccgcttcgcttccagcagctgatacggcacgccggcgtcctccagcaccgcgatgtcgcgggtggcattttcatactgtttggcggtacggaacagctgcagcgtcccgccctggcgcccttcatactgaatgccggtggtgtcgcgcagcgccttcaggcagtcgcggctgtactccgccaggcgcaccatacggcctttgttctccatatagtggcgggtgtcgcagttgcgcagcatctgccacatccacttcaactggaacgaggtgccgtcaagaccgatcgccagcggcgcatggcgctgaaacatccatttgatcgccttcagcggcacccccggcgccgcccagggcgccgcatagccgggagaaatctgcccggcgttggccgcgctggtctcctctgccggaccgggctgacggtcgatgaccgtcacgtcatgacccgcctgactcaaataccacgcgctggctaccccaaccaccccacttcccagtatgacgacacgcatagcgactccgtaacagttaaagaacaatcatctaattacaaattgataactcagttgaaaatattattcaacatacgctttatttatggtgacttaactcacagcaaaccgcaccagccctgcgctgtgagatttacgatctcatgctgcgctttatttttacccagcattaaattctgcaaataaggcaaaaaaacggctttgagatggggaaatcgcgaagaaaagcgattggcgtacagcacagtttgctgcaccgtgttctatgcttgtttagaggttttccgttcagagaaaaccaacaacaacgagggcgcgctaatggctacgattgactccatgaacagggacaccacccgtttaagcgatggacccgactggacgttcgagttactggaaacctacctggccgaagtggaccgggtcgccaagctctatcgtcttgacacctacccgcaccagatcgaagtcattacttccgagcagatgatggacgcctactccagcgtcggcatgcccatcaactatccgcactggtcgtttggaaaaaaatttattgagaccgagcaggcctataagcacggtcagcagggtctggcgtatgagatagtcatcaactccaacccctgtatcgcctacctgatggaggaaaacaccatcaccatgcaggcgctggtgatggcccatgcctgctacgggcataactcgttttttaaaaataactatctgtttcgcagctggaccgacgccagctcgatcatcgactatctgatctttgcccgtaagtacatcaccgagtgcgaagagcgctatggcgtcgacgaagtagagaaactgctcgactcctgccacgcgctgatgaactacggcgtcgaccgctataaacgtccgcaaaaaatctctctgcaggaggagaaagcgcggcagaaaagccgggaagagtatctgcaaagccaagtgaatatgctgtggcgcaccctaccgaagcgcgaagaggaaaaagcgattgaatccgctcgtcgctacccttccgaaccgcaggagaacctgctgtactttatggagaagaacgccccgctgctcgaaccgtggcagcgcgagatcctgcgcatcgtgcgtaaagtcagccagtatttctacccgcagaaacagacccaggtgatgaacgaggggtgggccaccttctggcactacaccatcctcaaccatctctacgatgaagggaaagtgactgagcgctttatgctggagtttctccacagccataccaacgtggtgttccagccgccgtacaacagtccgtggtacagcgggattaacccctacgcgctgggcttcgccatgttccaggacatcaagcgcatctgtcagtcgcccacggaagaggataagtactggttccccgatatcgccggttctgactggctggaaacgctgcatttcgccatgcgcgactttaaggatgaaagctttatcagtcagttcctgtcgccgaagatcatgcgcgatttccgcttctttaccgtgctcgacgacgatcacaacaattatctggagatttcggcgattcacaacgaagagggctatcgcgagatccgcaataagctctccgcgcagtataacctcagcaatcttgagccgaacatccaggtgtggaacgtagacctgcgcggcgaccgatcgctgaccttgcgctatgtgccgcacaaccgcgtcccgctggacaaaggccggcgcgaagtgctgaagcatgtgcatcgtctgtgggggttcgatgtgctgctggagcagcagaacgccgacggcagcattgagctgttggaccgctgcccggcgcggccgaacgcgctatagcattgcggggcgagtaaaataacaaagggggccattggcccccttgttctgtatatcgatcgcgaaaagcccgcttaacgcatattcatggctaaatcaccgggcagcgatttctgcatccggtgccagatctcgccgctgtcatggccgtagcgacgaaccagctcgtaaacctggtcatgcagaccggcctcacacactttcgccagctgatgatagaaaccgagcgccaggctgcgcgcttccgggctggagaaatagtggcggccgatgcgggtatacaaccccttcatgccgttgaggatcagaccgtagatcgggttgccggaggcaaacgccagaccacggaaaatattataatcaagctcggcgaaggcgtcggcgtgatcctccacctcccgggcgctgtccaggaccgccagcgctttatccggatgctggcgaaacgcggtgcggataaaaatcgtggaaatgttggtgcgcacggagagcagattatcaatcagctgcggtacgctgtcgtgatcgaggcgcgccagcgtttcgaggatattcaggccggaggtttcccaaaagttattcactttagtgggcttaccatgctgaatggtcagccagccgtcacgggccagacgctgcaatacttcgcgcagggttgtgcgggtgacaccgatcagctcagaaagctcgcgttcagcggggagaatcgatccgggagggaagcggttattccagatactctcaatgatgtactcttccgcgaaacccgcagggctctgcgccttaatgaccatagtaagatttccattacacagcgttacaattgcactcatcataccagagccgctatagcgcagatagcatggcaagtgaattaaaaagggatcgccgtttcattttccgcttttactttgcgcttttccttatcttcacaaaccgccagcgcggcgcgaagaaagttgcttctcattttgctcaactggtactcttgccaatcgttatgcacaaaaccatgcactcattgacggggaaggattctgtcgtggaaatttcttatggccgcgcgctgtggcgcaattttcttggccagtcgccggactggtacaagctggcattaatcattttcttaatcgtaaatccgctggtgttcgccgtggcgccgtttgtcgccggctggctgctggtggttgagtttatctttaccctcgccatggcgctgaagtgctatccgctgctgccggggggtctgctggctatcgaggcgctgctgatcggcatgaccagcccggcgcacgtccgggaagagatcgccggcaatctggaggtgctgctcctgctgatgttcatggtggcgggtatctactttatgaaacagcttttgctgttcgtgtttacgcgcctgctgctggggatccgtagcaaaatgctgctatcgctggccttctgcctggcggcagccttcctctcggcctttctcgatgcgctgacggtggtggcggtagtgatcagcgtcgccgtcgggttctacggcatctatcaccgcgtcgcctcggcgcgcccggacgatagcgacctgctcaatgacagccatatcgagcagcactaccgtgaggtgctggagcagttccgcggctttctgcgcagcctgatgatgcacgccggcgtcgggaccgcgctcggcggcgtcatgaccatggtcggcgagccgcaaaacctgattatcgccaaagccgcgggctggcattttggcgagttctttcttcgcatggcgcccgtgaccctgccggtgatggtctgcggtctgttaacctgtctgctggtcgaaaagtatcgcctgtttggctacggcgaaccgctaccgccgacggtgcgcaaggtgctgcaggagtttgacgatcgcagccgcgcccagcgcagccgtcaggagcgactgcggctgattgcccaggcgctcattggcgtttggctgatcgtggccctggcttttcacctggctgaggtcggcctgattggcctgtcggtgatcatcctcgccaccacctttaccggcgttaccgatgagcacgccattggcaaggcgttcaccgaggcgctgccctttaccgcgctgctgacggtcttcttctccatcgtcgcggttatcatcgatcagcagctgttcacgccggtgatcgagtttgtcctgcaggcctcgccgcacgcgcagctgtcgctgttttatctgttcaacggcctgctgtcgtccatttcggataacgtgtttgtcggcacggtctacatcaacgaagcgaaagcggcgctcgaacatggcgccatcagcctgccccagtttgagatgctggcggtagcgatcaacaccggcaccaacctgccctcggtggctaccccgaacggccaggcggcgtttctcttcctgctgacttccgccctggcgccgcttattaggctctcctatggccgtatggtgtggatggcgctgccctacaccatcgtactgacgctggtcggcctgttatgcgtcgagttcaccctgatgccagtcaccgactggctgctggcgcacggctggctggtgacgcccaccttgccctgagtcagtttttgcccgggttcgcccgggcgcatcaataacccgttacggaatattttccgccgcgcctctggcgtcggttcggttttcgtttacactgccatgatttagcatcttccagggaaatgattatgttgcaatatttaaaccagtgctcaagaggacgcggtgcctggctcctgatggcgttgaccgcttttattctcgaacttgtcgcgctgtggttccagcacgtgatgctgctgcagccgtgtgtcatgtgtatttacgaacgctgcgcgctgttcggcatcatgggcgcgggactggtgggcgctatcgcccccaaaacgccgctgcgctatgtcgccatggcaatctggttgtacagcgcgatacgcggactacagctggcgtgggagcatacgatgatccagctgcacccttcaccgttccagacctgcgatttcgccgcccgcttcccaacctggctgccgctggataaatggctgccgcaggttttcgttgcgtccggagactgttcagtacgtcagtggcagttcctgtcgctggagatgccgcaatggctggtggggattttcgccgcctatctgctggtcgctattctggtgatcgttgctcagcctttcaaagcgaaaaaacgcgatctgtttggtcgttaagccgcggcaagtccagcccataatgaaacgccctacggggcgtttttttatgcctcctgcgcatcgctgaatcgtttcatttctatggttgaccacagctgccaaaaggtgcatattaaatacatcttttaaaaccccacaggagctcacatgtcatctttactgatccccgcagactggaaagttaaacgctccaccccattctttaccaaagagaatgtccctgccgccctgctgagccaccacaacaccgcggctggcgtcttcggccagctgtgcgtcatggagggcacggtcacctattacggttttgccaatgaacaggcgacggagccggagaaaaaagtcgtgattcatgccgggcagtttgctaccagtccgccgcagtactggcaccgcgtcgaactcagtgacgacgcccgcttcaatattcacttctgggtggcggaagaaaccgacggtgaaaacgggctgttccacgcgaagaaagcgtgacggcgcttagcgcgccctgtcaggcagattaaggatatggtcctgccagtcgaccaccgtggactcaggcaccgcaatatggcgaacggagatgcgttcgccgtgcatcgccgcttttgagccagtcagcagcgggtgccaggccggcagaggcttgccttccgccagcaggcgataggcacaggtcggcggcagccattcgaaggtcggcagattttcgcgggtaagcttgatgcagtccggctcatactcaaagcgacgcgcgtagttacgacactggcaggttttgatattgagctgacgacaggcgacgttggtgaagtagatctcgtcagtgtcttcatccatcagcttgtgcaggcagcactggccgcagccgtcacacagcgattcccactccgcgtcgctcatgtcatccagtgttttttgttgccagaaaggttgttcgctcatcggagtgtccgtcgttgccagttaagggtgcaccttataaccagtctggcacgccgatgcaagttttgccgccccaaaaggcggcaaatagcgcttacagcacgcgggtagtgagcgccaggccgttgaagccgacctccagctcgtcaccgctgtgcagcggccccacgccttccggggtgccggtgaggatcacatccccggctttgagggtaaagaagcgcgacatataggcgatcagcggcacaatcctatggatcatgtcggcagtggtgccctgctggcgcacttcgccattaatcttcagacttaacgacgtattctgcgggtcgccgtggaactcagcggccgggataaagccggagatcggacaggcgttatcgaagcctttggccttctcccagggttgtcccgcttttttcattttcgcctgcaggtcgcgcagcgtgagatccagcgcgacgccatagccggcaatccctttcagcacatgctcttccgtcgcctgacgcagcgtgctgccgataagcaccgccagctcgacttcgtgatgcaccgagcccagcccctcaggaagcaccaacggctgacgaagatcgcacagcgcagtctcaggtttaataaacagcaccggctcttccggcgtcgcactgcccatttccttgatgtgtttcgcataattactgccgacgcacactactttgcttactggataatccagaagcgcaccctgccagttatgatgttggtacattattttccctcgtgggttaatcggattgtttcccctgttccgccaggtgtttctttagtagattttcagacggcggaggcagttgcaggtaatagccctgttcgcttaacgcctgtttcactttttccagatcggcgttaaccagttttttgcgcccatccagcggcagcagcatcgccatttgcggcgtgccaaagctgcgcattagctcgtcaggaacgcgcgagaaatcgtcctttttttcgacgtataaataggtttgttcacgtttagtacttcgatagatcacacaaaacatagttttactcggaattagacccgtggtcacttgcctcaatatatgagtgactataacatgccttttagtcttcggaatatcaccgcacttcggcggttgataaacagcaaattgagtaaggccaggatgtcaaatacgccaatcgaacttaaaggcagtagcttcacgttatctgtcgttcatttgcacgatgcaaatcccgaggttattcgtcaggcgttagaagacaaaatcgcccaggctcccgcttttttacgtcatgctccggtggtggtgaatatcgccagcatcgaggaggaggtggaatggcgcgccatcaacgaggctatcgccgcgaccggtttacgtattatgggcgttagcggatgcaaaattccgcgcctgaaaaccgaaatcgaccgcgccggcatcccgttattaaccgaagggaaagaaaaagcctctcgtccggcaccgtccgaacccaccccgccgccgccagttgctagtcagatcacaaaaacgcgtttgattgatcagccggtacgttccggtcagcgcatttatgcgccacactgtgatcttattgttacaaatcatgtgagtgccggtgcggaacttatcgctgacggaaatatccatgtatatggcatgatgcgaggacgtgcgctggcaggcgccggtggcgacagagacgcccagatattttgtacccaccttgcggcggagctggtctccatcgccggggaatattggctgagcgataacatcccggccgaattttatggcaaagcggcgcgcctgcgtttaggtgaaagcgctttggcaattcaaccgttaaattaatccctttttaacaaggaatttctatggcacgcattattgttgtgacttcgggtaaagggggcgttggcaagaccacctccagcgcggccatcgctacaggtttggcccagaagggaaagaaaaccgtcgttatcgacttcgacatcggcctgcgtaacctcgacctgattatgggctgcgaacgtcgcgtcgtttatgatttcgtcaacgtcattcagggcgatgccacactgaaccaggcgctgattaaagataagcgcacggaaaatctctacattctcccggcttcccagacccgggataaagacgctctgactcgcgaaggcgtcgacaaggttctcgaagaactgaagaaaatggaattcgatttcatcgtctgtgattccccggcaggcattgaaaccggtgcgctgatggcgctttactttgctgatgaagccatcatcaccactaacccggaagtctcctccgttcgcgactccgaccgtatccttggcattctcgcctctaaatcccgccgcgcggaaaatggcgaagagccaatcaaagagcatctgctgctgacccgctacaatccaggccgcgttaataaaggcgatatgctgagcatggaagacgtgctggaaattctgcgcatcaacctggtaggcgtgatcccggaagaccagtcagtcctgcgcgcatccaaccagggtgagccggtgatcctcgatgccgcctcggacgcaggcaaagcctatgccgataccgttgaacgtctgctcggagaagaacgccctttccgcttcattgaagaagagaagaaaggattcctcaaacgcctgttcggaggataaattatggctttactcgacttttttctctcgcgaaaaaagaacacggctaatattgcgaaagaacgcctgcaaatcatcgtcgccgagcgccgccgcggagacgcggagccgcattacctgccgcagttacgcaaagatatcctggaagtgatctgtaaatacgtacagatcgacccggagatggtcagcgtgcagctggagcagcgggacggggatatatccattcttgagctgaacgtgaccctacccgaaacggaagagtcgaaatcctgacctgtcgcgctatcgcgaaaaaaaaccggctacgccacgcgccgccggttttttaatggtctgaaccaggccgcgaactagcgcggatagtcgtttaacagcctcttcagccgctcggccatcagctccccgcgccaaccggaaatcagctcaggttcaccggcttgcgttttcagctgccagtgccagttcagcagctggttgatctgccgacgcgacgccagcagctccgcgcttacgcccttctccgtgctcacttcctgcaccagcgctttaatatctttaaaggctttgcggtagcccggcatgtcgatcaggttctgcagcggcgccggcagggccgactccggcagcgcctgcgctttttcgaccaggctaatcagcgttttgccgtggaagcgaatttcgctaccggacaacccgaggctgtcaagctcgcccaggctggtgggcatatagcgcgccacgctccacagatgctcttcccgcaccacaaagtttaccgccaggtcgcgctcgcgcgctttgcgcaggcgccactccgccaacagctgtagacaacccagctggcgggtacgcagctgccaggcgttgccgatatcgcgccaggcctcggccgggtctaccacctcctgacgacgctgctgcatcacgcggcactcgtcgagcgccgccggcagccagccagcgcgatcggtctccgccattaactggctggcgatcggcagcagataccagacgtcggccgcggcatattcacactgacgctcagtcagcgggcgcgccagccagtcggtgcgggattcgcttttatccagcgctaccccggaatactcttccaccatcgaggcgaagccccaggacattgggcggccgcagaaggccgccaggatctgggtgtcaatcagcggctgcggcatcaggttaaatgcattaaggaagacttctaaatcttcgctgccggcatgcaggtatttagtcacatcctggttgagcagcaggtcgcgcatcggcgcccagtcgttaatcgtcaagggatcgatcagagagacctgctggccgtcgaacagctgcagcaggcccagctgcgggtaataggtgcgggtgcggacaaattccgtatccagagcgacggcggaggccgtgcttgccgcttcgcagacagcgcgcaggccatcgtcggtggtgatcatctgatagttcaaagcatactctcttaacttgcgcccataaaaaacgccggcgtagccggcgtcaggcgactcattcgttacttagcctttattgtccactttagcgcgcgcttcgtcacgcagttctcgccgcaaaattttcccgacgttggatttcggcagttcgtcacggaattccaccagcttcggcaccttgtatccggtcaaatggcgacggcagaacgtaatcagcgcctcttcggttaacgcagcatctttcttgactacgaaaatcttcaccgcttcgccgctgctgcctgacggcacgccgatggccgccacttccagcaccccgctatgctgcatgaccacatcttcgatttcgttcggatagacgttaaaacccgacaccaggatcatatcttttttgcgatcgacgatgcgcaggaacccctcttcatccatcaccgcgatatccccggtgtgcagccagccgtctttgataatctcatccgtcgcgtcagggcgctgccagtagcccagcatcacctgcggccctttaatacagagctcgcccggctgacccggcgccacttcgttatcatcatcatccaccagtttggcttcggtggaaggcaccggcaggccaatgctgccgctgtggtagtcaatatcgtgcgggttaacgctgaccagcggggaacactctgtcaggccgtagccctccagcagatattgcccggtcagttttacccagcgctcggccaccgcctgctgcaccggcatcccaccgccggcggacaaatgcagcgaggagaaatcaagctgctggaactctttgttgttcagcaaggcgttgaacagggtattgaccccggtcatggcggtaaaaggatacttcgccagctccttcaccagcccggggatatcgcgtgggttggtgatcagcaaattttgcccgcccagttcgataaacagcaggcagttcatggtcagggcgaaaatgtgatacagcggcagcgcggtcaccacgaactctttgccgcgatgcagcagcgggccgtaggtggcattgacctgctcgaggttagccagcatattgcggtgggttagcatcgcacctttggccacgccggtggtgcccccggtgtactgcagaaacgccagatcttccgcaacgatctccggcttgacgtactgcatgcgatagccgtgctgcaacgcgctgcgaaacgagatggcgtccggcaggtggtacttcggcaccaggcgcttaatgtacttgaccacaaagttcaccagcgtgcctttggcggtggaaagctggtcgcccatgcgcgtcaggatcacatgctggacctgagttttcgccaccactttttccagggtatgggcaaagttggagactatgacgatcgccgccgcgccgctgtcgttgagctgatgctccagttcgcgcggggtatataaggggttgacgttaaccacgatcatcccggcgcgcaggatgccaaacagagccaccggatactgcagcaggttaggcatcatcagggccacgcgatcgcccttctgtaaccccaacccctcctgaagataagcggcgaaggcgcgactacgctcctccagcttacggtaggtcatcactccacccatattgataaacgccggttggtcggcgtaacgggtggtggcatgttcaaacagttcaaccagggattgatagcggtcaggatttatctccgccggaacatctgcgggataacggtttagccaaacctttttcactgcatcacctctgaaatagttattcgtcgtcatcacagcccctggataatacattttgttaacattatattaactcagcgtaccagtttattaattaggcaatgagcaggttgcgaagcgcgtcactattttttttcttattcgactgaaaacaaagaaacagcggaccggccgctgtttctttgaactaacataaacaacaaaatcattcggttacaacgtttctcacctcagcagggccgggattgtaccagccccagccgccatagccgtagccccaggggcgcggacccagcatccacgggtcgataggttgcggaggcatcaccacctgctgcactacgttccagcgcttgtagccggtggcgttcatcagcataaattgatacggcgtgctgcccaccttgccgtcaaccaccccggcgatcggtccgaccacggtcactagttgaccgcggaaatccaccggatcgaggaagccattgacgtcagcaaaaatccttccgcgggacggctcgcccagcactggccgcgcgccgctgtccagcggtacggtggcgatttctaagcgggttttcccctgctggttttgcacattgaccaccttaccgccaaagcgcgcttcctggccaacgtacagctgcggggcgttcatcacccgcactaaatcctgctgcggcgtcgggctggtgcctttgatggcatccggcactgacacgcagccgcttagcgcaacggcaaccgctgcggccagcagccagcgaacgccctgtttttgacccgccatgatgcgactccttttctcagtcttcttgttactgagattcactcgcggcctggaagtttcttccacgccacctcgtttcgcaaataaaccggctccgctttctccacggccacggttttccccgccgccagcaggtaacaggctaacggcagcatatcctccgccgccggcaattcaatttcgccgctgcttaaggtcagtccgctcgctttcgccagatccggccacgcctgccatccggtgccgacggtggcccattcgccggaaagctgtgccagtcgttcggctaccgcgtccggtttgagcaccgcttccgtctcttcgccatgccagacgccctgctcgtcgcgctggtactcggcccagtagacttcgcccatacgcgcatcaatggccgccagcacacgggtggcgccggttttgcgccaggcgccctgcgccatggtggccagcgtggaaacgccaatcattggcagttcggcgcccagcgccagcccctgagcgataccgatgccgatgcgcacgccggtaaagctgcccggaccgcggccaaaggccagcgcgtccagctcgctcagcgtggtgccgctctcggtgaggacctcctgcaccagcggcaggatacgttgggtatgttcgcggggacaaatttcgaaatgagcactaagggtgccatcattccacagagccgcggagcaggcctctgtggcggtatcgatagccaaaattcgcatgggtggtcacgctctcgttacatagttcaggccttcaggcagcctgatttccggcaaacggccaacccgccgccatgccgcccgaagtctattgggaaccgctaattaacaaaatggcgcgcagcttaacacattttagtgcggattaccttgccggcggtacggcgagaaagcgcaccgcccgacggatatcgcgggttcgcggcgccggcggcagactggccaggaacaccgcgccgtaggggcgcatcaccagccggttgtcgcagatcaccagcaccccgcggtcgtcgatatcgcggatcaggcgacccaccccctgcttgagggtgatcaccgcatccgggagctgcacttcatcgaagggatcgccgccgcgcagccggcaatcttccatccgcgcttttagcagcggatcgtccggcgaggtgaacggtagcttatcgataatcaccagcgacagcgcgtcgccgcgcacatcgactccctcccagaagctgctggtagccaccagcagcgcgttgccggcgctgacgaactgctgcagcagctggcctttactggtctcgccctgcagcagcaccggtagcgtcatggtggcgcggaactgctccgccagatcgcgcatcatggcgtacgaggtgcacagcataaagcagcgaccgtcgttggcctcgatcagcggcttgagcatcgccgccaggtggcgcgccgcgccgggctggttcggcaggggtaggttgcgcggcacgcagagcagcgcctggtgctgatagtcaaagggactcggcagcagcagagtctgcgcctcgtcgatccccagccgggcggtaaagtgatgcagatcgtcgttcaccgacagcgtcgccgaggtaaagatccagctccccgacttctgcgccatcacctctttaaacttctcggccacggtcagcggcgtcagcgcgagagtaaagtggcgcgaggtacactcataccagtagctgtagcccggctggttgatctctttcaaccgcttcaggcgcccgcgatagagggtggcgcgctcaaaagcggcgtcgagcagcgccgagcgacccagcgaaagtttggcgacgtcatagcatagctcgagcgcgtcatcgagcagcagcagcgctcgctgaatgtggctgtccgccagcagctcgcgcagattgccgcggtagcccgggtctcccagctgcaggcggaaatcctgcgcgctttgcgccaggcggtcggcgcatttttgcagctgctgagtgtctttcagttcggtgcggtaggcaatggtgatgtctttcgccaggtccagcagctggcggctggagagcgactggccaaagtactgactggcgatatccggcagctgatgggcttcatcgaagatcatcacttccgcctcggggatcagctcggcaaagccgctctctttgaccaccatatcggccagaaacaggtgatggttgaccaccaccacgtcggcgtccatcgcttttttacgcgccttcaccacgaagcaatctttatacagtgggcagtcgctaccgagacagttatcgttggtgctggtgaccagcggccaggcctgagagtcttccgcgacgctggcgcaggtgctgatatcgccatcctgggtttgattcgaccaggagcgcaggaggatcacatcgctgagggtttgcaccggcagatcgccgcccgccagcgcctgctgctcaagacgttcgagacacaggtagttggagcgccctttgagcagcgccagtttcccggtgaatttgagcgctttggcgacggtgggcagatcgcggctgtaaagctgatcctgcagcgctttcgagccggtggagataatcaccttttttttcgcccgcagcgcaggcgccaggtaagcgtaggttttaccggttccggtccccgcttccaccaccagcggccgggaggcctcaatcgcttcgctgaccgccaccgccatctggcgctgcggctcgcgcggtttaaatcccggtatggctttggctagctggccgtctgctgcaaaatcgtcgatcacattgccccctggttatttggacagtgattatgtcagggaggacggcgtttcgccagtccgggtagtgacgcgagcggcacattatggcagtcttgccgcagccgaatggaatgcttaaagaggaaaagcaatgacaattacgcgtattgatgccgaagcccgttggtcagacgtggtgatccacaaccagaccctgtactacaccggcgtgccggcaaatctcgatgccgacgctttcgagcagaccgccaataccctggcgcagattgacgcggtgctggaaaaacagggcagcgacaagtcgcgtattcttgacgccaccatcttcctcgccgataaaagcgactttgcggcgatgaataaagcctgggacgcgtgggtggtggctggtcacgccccggtgcgctgcacggtggaagcgacgctgatgaacccgcagtataaagttgagatcaaaattatcgccgcggtgtaattactcgtcctcatcctcatcttcaaagcgcgcaacgatctgctcgccggtatgcgttgcgcgcagctcttccgccaccagggcaatcgcctggccgctgcttatcccctgagccattagctcatggatacgttcgaccgctttttgctgttgctcgtggctcagcgaaggtaaacctgcaaacatcttttactcctgctacattgtggggcgtaattatttcacgccgtccccaactacgccagaggggcggtaacgttcaggatcgagaaagatgttgtcccccgcgattattaccctgccctggcgcccggatgcggccgaacactattttgcgccgttaagcgccctgccctgggcgatgctgctgcattccggctttgccgaccatccgcataaccgctttgatattctggtggctgccccgcgcgccacgctgctgacgcgcggtgaacagacgtgggtcgacgacggcgaaaccgttgttgtctcagcggaagatccgctgcagctcctgcagcagcagttggatcgtcagccgttcacgccgcaaccccatgacgatctgccgtttctcggcggcgcgctgggattattcggttacgacctgggccgtcgctttgagcgtctcccttcgcacgcgcaggccgatatcgcgctggcggatatggcggtggggatctatgactgggcgcttatcgtcgaccaccagcgccaacagatatcgctgctcagctatgacgacccgcagcagcgtctacagtggctggaggcgcaaacgccgacgccgggtgaaaccttcgccctgacctctgcctggcagtcaaatatgagccgccagcagtacggggaaaaatttcgccaggtacaggcctatctgcacagcggcgactgctatcaggtcaacctcgcccagcgttttcaggccagctacgtcggtgatgaatggcaggccttccgccagctgaacgccgtcaaccgcgccccctttagcgcctttattcgcctcgatgaaggggcgatttttagcctgtcgccggagcgctttatccagctgcgccagggggagatccagacgcggccgataaaaggcaccctgccgcggctcgattcgccgctggcagatgcgcagcaggctgagaagctggcgaattcgccgaaagatcgcgccgagaatttaatgattgtcgacctgatgcgcaacgacatcggccgcgtcgccgtcccgggcagcgtgcgggtccccgagctgttcgtggtggagccattcccggcggtccatcatctggtcagcaccatcaccgcccgcctgccaatgacgctgcacgccagcgacctgctgcgcgccgcctttcccggcggctcgatcaccggcgcgccgaaagtgcgggcgatggagattatcgatgaactggagccccaacgacgcaacgcctggtgtgggagcattggctacctgagctattgcggcaatatggataccagcatcaccattcgcaccctgacggcatggcagggacagctgtactgctccgccggcggcggaattgtggcggatagcgaggaagcggcggaatatcaggaaacttttgataaagttaatcgtatcctgcagcaactggagaactagaccatggcggatcgcgcccttaatctggatgattttctgtcccgctttcagcttctgcgcccgcagccttcgcgccatgcgctcaatcagcggcaggcggcggtgctggtgccgatcgtgcgccggccgcagcccggcctgctgctgacccagcgttcgccgctgctgcgcaagcacgccggccaggtcgcctttcccggcggcgcagtagataataccgacgcgacgcttatcgccgccgccctgcgcgaagctcaggaagaggtggcgatcccgccggaggcggtcgaggtgatcggcgtcctgccgccggtggacagcgtcaccggctttcaggtgacgccggtggtgggcattattcccccggatctgcactatcacgccagccaggacgaagtctccgcggtatttgaaatgccgctcgccgaagccctgcgccttgggcgctaccatccgctcgatatccaccgccggggcaacgaccaccgcgtctggctctcctggtaccagcattattttgtctggggaatgaccgccgggatcattcgcgagctggcgctgcaaattggcgcacgtccttagctatactgataatgagagggcgctctcattattagtaaaatcgcggttagccattagtttaattcatgtgaatagttgaactgacagggcgcttccctcttacactatgcgcagttattacatcgttaccgcacccgcggtaaccctgtcaggagtattatcgtgattagtctattcgacatgttcaaggtggggattggtccctcatcttcccacactgttggcccgatgaaggccggaaaacagttcgtcgatgacctggtcgaaaaaggattgcttaatgcagtgactcgtgtggcggttgacgtctacggttcactgtcattaaccggcaaaggccaccatacggacatcgccattatcatgggactggcgggcaatcagcccgatacggtcgatattgacgcgatcccggcttttatccgtgacgtcgaagcgcgcggtcgtctgctgctggccaacggccagcacgaggtcgacttcccggcggatgacggcatgcgttttcgtagcgacaacctgccgctgcacgaaaacggcatgaccattcacgcctgggccggcgagaaagagatctactgcaagacctactactcgatcggcggcggctttattgtcgacgaagagcacttcggcaaggaaaacgccaacgaactgcaggtgccctacccatttaaatcggcgcaggaaatgctggcctactgcaaagagactggcctgtcgctctccgggatggtgatgcagaacgagttggctctgcacagcaaaaaagagatcgaggattatttcgccaacgtctggcagaccatgcgcgcctgtatcgaccgcgggatgaacaccgagggcgtgctgcctggcccgctgcgcgtaccgcgtcgcgcctcggcgctgcgtcgtctgctggtggccagcgataagctctccagcgatccaatgaacgttgttgactgggtcaatatgttcgcgctggcggtcaatgaagagaacgccgccggcggtcgcgtggtaaccgcgccgaccaacggcgcctgcggcatcgttccggcggtactcgcctattacgatcactttatcgagtccgtcagcccggagatctatattcgctactttatggcctgcggggcgatcggcgcgctgtataagatgaatgcgtccatttccggcgcggaagtcggctgtcagggcgaggtgggcgtcgcctgctcgatggcggcggcgggactggctgaactgctcggcgccagcccggaacaggtttgcgtggcagcggagatcggcatggaacacaacctcggcctgacctgtgatccggtcgccggtcaggtgcaggtgccatgcattgaacgtaacgccatcgcctccgtcaaggcgatcaacgccgcgcgaatggcgatgcgccgcaccagcgaaccgcgcgtctcgctcgataaggtgatcgagaccatgtatgaaaccggtaaagacatgaacgccaagtaccgcgaaacctcgcgcggcggcctggcgattaaagttcagtgtgactaaacttttcgtgcccctctgcgcccgcaaagcgcgcagggggataaccctggtgactgaaatctccctgatgcgccttcaacggcgcattttcttttttctatacctggcgatattctgccactacacttgctctatcaaataagccacgcttaaccactcgtcctgtcgacagggtgtcgcacatgcagactgcacaaaaagtcattacggcctatcgtcacaaacgcattattgtctgcctgctggtagccctggcgaccctgggcgccacattagccatccgatttatttcgcagcgcagcgtaaatgaagattatattcgcacggccgccagccaacgggtggcggcgctcaatgacatcttgcgcccgctaagcgcgcagcgagccaccctgctccctctggtgggcaaaccctgccctgatatccatctgacgctgcgcaaaatggcggcctcgttgcaaaccattcgttccgtcgccctcgtcacgtcaggtatcgtttactgttccagtatttttggcccgcgacaggcagacttacatcgcctgcagcccgcgcttcctgcgccccgccctctgctgctcttctcgaacgacagctccttgctcaaaggctcgccggtactgatccaatggtatccagccgcggagaacggcctggacggcgtgatgctggtggtgaatattgagctgctgggaaccttaattcttaatgaaaaatcggccctgatcagcgacgtcagcctgcaggttggcgatcgttattttagcagccgccatgggcttctcgaaaaagcgcatgtcccgcagggcacggtgatttatcgccagcgctctacggagtttccgtttactgtcaatattaacggccctggcgcctcggcgattgcgcttgaggagctgcccggcgagctgccgctggcgctgatttttagcctgctaatgaccggcatcgcctggctggccaccgccggcagaatgagtttctcgcgggaaataagccttggcatttcggcccgggagtttgccctctggtgccagccgctgcaggatgcgcgcagcggccgctgctgcggggtggagatcctgctgcgctggaataatccccgccgtgggacgatttcgccggaggtatttatccccatcgccgaaggcaataatctgatcatccctctcacccgctatgtgattgccgaaaccgctcgccgcctggacgcttttcctcgcgaccgccattttcacatcgcgatcaatgtcgccgcgcgccatttcgctaacggactcctgctgcgcgacctgcacaattactggttcagcgtggatccggtgcagcagctggtggtcgagctaaccgaacgcgatgtcctgcaggatggcgaccagcatatggccgaacatctgcactttaaaggcgtacagctggcgatcgatgattttggtaccggcaatacttcgctctcatggctggaaaagctgcgcccggacgtcctgaagatcgaccgctcgttcaccagctcggtcggcatagatagcgtgaacgcgacggtgacagatattattatcgccctcgccaaccgcctgcatattgttaccgttgccgaaggggtggagacgctggagcaggaaaactacctgcgtagccacggcgtcgatgtgctgcaggggttttattatgcgcggccgatgccggtggaggcgttcccggcgtggctggccagcagggaggagagtgagagtgagggtgagagcgagacgacagaataactcgccggccgcagcggccggcgagcctggcgattactcttcttcgtcgctcggcggccgagtgaccaccgcgcgcaccagatcgacccggtaatcattcgcttccactacggtaaaatgcagcggcggaagcgacacgacgtcgccaatgcgcgggatatgaccattggcggagatcaccagcccggcaacggtggcaatatcctcatcgtcattgatcagtggatccagccccagcgcctgctgcagcgcatgcaggtcggtcgaccccttaataagccagccatcgccatcgatgacaatctctggcgtctcatcagcgtccgggaattcaccggcgatggcttcaaggacgtccagcggcgtgaccagcccctgcaccacgccaaattcattagttacgatgacgaagctgccgcgcgcccgacgcaggaccccgagcagattgatcgggtccagcgtttccggaacgacaattgccggggaggcagaagccagcgccgcgacgttttcccccgactccagggccaccagcatctctttcgcccgcacgataccaatgatttcatccagctctccgcggcagaccgggaagaggctgtgcggcgacgacagcagctgacgacgaatttcatcttcactctgttcagcgtcgacccagctgatttctccgcgcggggtcatgatgctgcgcagggagcgctgggccagggtcagcacgccattaatcatgtagcgctcttcttccgcaaaggcgccctcaggaacgggcaccgcggctggactgtctgcgtcatggctgacggaggcctgtttgcggccgcccatcaggcgcaggatggcatccgcggtacgagcgcgcagcggcagcgtcgactggtggcgaacaaagttacggcgcgccacctggttaaagaactcgataatgatcgagaaaccgatcgccgcgtacagatacccttttggaatatggaagccaaacccttccgccaccaggctaaggccaatcatcaacaggaagctcagacagagcacgaccaccgtcgggtgctggttgacaaagcgcgtcaacggcttggaggccagcagcatcaagatcatcgcgatcaccaccgccgccatcatcaccggcagatggttaaccatcccgaccgccgtgatcacggcgtccagggagaagacggcatccagcaccactatctgcaatactactacccagaaactggcatagcctttaccgtgaccggcatcgtgctggcggttttccagccgttcatgcagctcggttgtcgccttaaacaacaagaagatcccgccgagcagcatgatgagatcgcgcccggaaaaggagaaatcggcgatggtaatcagtggtttcgtcagcgttaccatccaggagatgaccgacagcagtcccaggcgcataaccagcgccagtgacaggccgatcagacgcgctttatcgcgctgcttcggcggcagtttgtccgccaggatggcaataaacaccaggttgtcgataccgagcacaatttccagaacgataagcgtcaacaggccggcccagattgagggatccattaacaattccatgtacgactccggtttgcggcaaggtcagtcatcgccatgccatgcaggggcgcgacaccaggtgctgaaagaaatgcgggatacgtagaggtggcaatcagatgccagaaagtgaaaagacgtcgatgacggtccatactgcgggctatgccctatactcctgagtaattaaacggaagttaaacatagcaaaatatagatcgaaattggaaataatttacctgaatttgcaataactaaggctattttttgcgctgcaaaattattcgcagacgatacgtgattaacggatcttcatcacattaattattttttcactgtctaaaataattcgcggtagtaactattctctatcttacaccctaactgaatcgattttgtcctcaagagtgattcaggatgtatcaaagcagatgatgcattcacgataataaaggaggtagcaagtgacgattgctattgtaataggcacacatggttgggctgcagaacagctgctgaaaacagcagaaatgctgttgggcgagcaggaaaacgttggctggatcgatttcgttccgggtgaaaatgccgaaacgttgatcgagaaatacaacgcccagttggcaaaactggataccagtaaaggcgtgctatttctcgtcgatacatggggaggcagccctttcaacgctgcgagccgcattgtcgtcgataaagagcattacgaagttatcgccggcgtcaatatcccgatgctggtagaaaccttcatggcccgcgacgacgatccttcctttgatgaactggtcgccttagcggttgaaaccggcagcgaaggcgtgaaagcgcttaaagccaaaccggtggaaaaagcggcccctgcgcccgcgcctgccgcagcgccaaaagccgccgcaccggccaaacccatgggcccgaacgactacatggtaattggccttgcgcgtatagacgaccgtctgatccatggtcaggtcgccacccgctggaccaaagagaccaacgttacccgcatcatcgttgtcagtgatgaagtggccgcggataccgtgcgtaaaactctgctgacccaggttgcgccgccgggcgtcaccgctcacgtggtggatgtggccaaaatgatccgcgtctacaacaaccccaagtatgccggacagcgcgttatgctgctgtttactaacccgaccgacgttgaacgtatcgtcgagggcggcgtgaaaatcaccagcgtcaacatcggcggtatggcgttccgccagggtaaaacccaggttaacaacgcgatttcagtcgatgccaaagatattgaggcgtttaaaaagctgaacgcccgcggtatcgagctggaggcacgtaaagtgtccaccgacccgaaactgaaaatgatggatctgatcgctaaggttgataaataacccggcggatcgcgccccagttttcactttaagacttaatcaacaggagaagtacaatggagattacccttcttcagattgtgctggtgttcatcgtcgcgtgtattgcgggtatggagtcggtacttgatgaatttcagttccaccgtcccctgatcgcctgtacgctgatcggcgccgttctcggcgatatgaaaaccggtattatcatcggcggtacgctggagatgatagccctgggctggatgaacatcggtgcggcggtagcccctgatgccgcgctggcgtccattatttccaccgtcctggttattgccggccatcagagtatcggcgccggtatcgcgctggctatcccgctggcggcggcaggccaggtgctgaccatcatcgtgcgcaccatcaccgtggccttccagcacgcggcggataaagcggcggagaatggcaacctgactgccctgtcgtggctgcacgtctcgtccctgttcctgcaggcgatgcgtatcgctatcccggccgttatcgtggcgatttccgtcggcaccagcgaagttcagggcctgctgaatgctatcccggaagtggtcaccagcggtctgaacatcgccggcggtatgatcgtggttgtcggttatgcaatggtcatcaacatgatgcgcgcaggctatctgatgccgttcttctacctcggcttcgtcaccgccgccttcaccaacttcaacctggtggccctgggtgtgattggtgcggtcatggcaatcctctacatccagctgagcccgaaatataaccgcgtcgccggtgcgccggctcaggcggctggtaacaacgatctcgataacgaactggactaacaggtgagcgaaatggttgatatgactaaaaataccaccgagaaaaaactcacacagagtgatattcgtggcgtgttcattcgttctaacctgttccagggttcatggaacttcgaacgtatgcaggcgctggggttctgcttctctatggttccggcgattcgtcgtctgtacccggagaacaacgatgcgcgtaagcaggcaattaagcgtcaccttgagtttttcaacacccacccttacgttgccgctccggtactgggcgtaacgctggcgatggaagagcagcgcgccaatggcgcagagattgacgatggcgctatcaacggcatcaaagtcggtctgatgggaccgctggccggcgttggcgacccgatcttctggggtaccgtgcgtccggtgtttgcagccttaggcgccgggatcgcgatgagcggtagcctgctcggtcctctgctgttctttatcctgttcaacgcggtgcgtctgctgacccgttactacggcgtcgcctatggttatcgcaaaggcgtggatatcgttaaagatatgggcggcggcttcctgcagaaactgactgagggggcgtcaatcctcggcctgtttgtcatgggggcgctggttaacaagtggacgcatgtgaacattccgatggtggtgtcaaaaatcaccggctctgacggacaggttcacgtcaccacggtgcagactatccttgatcagctgatgccgggtctggtgccgctgctgttgaccttcgcctgtatgtggctgctgcgtaagaaagttaacccgctgtggatcatcgttggcttcttcgtcatcggtatcgccggctacgcggtcggcctgctgggtctgtaacttccaggctgtacgccgggggcttgcccccggcttttttttatcaggagaaacgcaaagcaatgaccttcacggacctggtgatcatcctgtttatccttgcgctactggcctacgcgatatatgaccagtttattatgccgaggcgaaacggcccggtactgctggccatccccctgcttcgccgcagtcgcgttgacggcatgatctttgtcggcctcaccgccattctgatctataacaacatcacccagcacggcacggcgatcaccacctggctattatctgtgctggcgctgatggggctctatttattctggatccgtacgccgaaaatcatttttaaaccgcgcggctttttcttcgccaacgtgtggatagaatatcagcggattaaagagatgaatttatccgaggacggtgtgctggtgatgcaattagagcaacggcggctgctgatacgcgtacgaaatatcgacgatctggagaagatatacaaacttctcattacaactcaatgacttaaaaatatagccagcgctatattattcccgttagcagcggagaaatattatagccacggctatatttcccgcctaaccttatcttttttattaactattttttcacttataaattttaatgaaaatcgttatcatttggttattaaaatagccctcttctgttattgttttatattctaaaaatatgttaaggttgcgcccgtcgttggggagtagccgatttcctgcccgccaggaaatgtacgtgtcaacatactcgttgcaaaacgtggcacgtacgggttgaagagattcaatcaggcgagaccatagatacatcactgctgtacgtattgctcagccattgagcggctccgcgtatgtttactgggggcagcgatgtgtcatatggattatccccggtcaggacacgcacatgaatttatccgctaccattcttctcgctttcggcatgtccatggacgccttcgcagcctccatcggcaaaggcgccaccctgcataaacccaaattttcagaggcagtacgcaccgggctgatttttggcgccattgaaaccctgacaccgctggtcggctgggggcttggcatgctggccagccagtttatcctcgagtggaatcactggattgcctttattttactggtgtttctcggcgggcgaatgatcgtcgaaggttttcgcggcgacagcgacgaggcgtgcgaggcgcctcaccgacatggtttctggcttctggtcaccaccgccttcgccaccagccttgacgcgatggccgtcggcgtcggtctggccttcctgcaggtcagcattgtgaccaccgcgctggcgatcggctgcgccacctttatcatgtcgacgctggggatgatggtcggtcgctttatcggcccgctgcttggcaaacgagccgaaattctcggcggtatcgtgctgattggcatcggcagcgaaatcctctggagccatttcgccggttaagctttacgcttcgcgctgccagcagtggatcataaaatcggtctggcaaccaaaggtcggctgctgacgcagcgcggcgtgcacttcggctttagcccgccatgcgaacggcgtcatctgcagcagggcctgcgcttcacttcccgtcaggatcatcggataagccagctgctgctgagcctccaggcggaaccccggcatcgcttccgtcttcagctcatgcaggcgaacttcatcgtaaatcagccctttcagctccagtaggtgacggggacccggcgtggcggtgatcacccaaccaccgggacgcaccacccgcgccagctcttcggcgttgcagggcgcgtaaatgcgcactaccgcgtcgaagctagcgtcggaaaatggcaggcgctggctggaggccacgcaaaaattcacctgcgggtagcgttttgccgccgcgcggatcgccggcttcgacacgtccagcccccagctgcagctggcgatggcggcaaacgcgtgggtgtaatacccctcgccacagccgatatccagtaaatccgtaggggcgtaatgtcgcagccgctcagcgatagcatcccgtagcggctgataatgtccggcgtcgaggaacgcccgccgggcctgcatcatttcggcgctatcgccgggatcgcgcgaccgcttgaactgcaccggtagcagattgacgtacccctctttcgccagatcgaactggtgccgctgcgggcaggaatagtggttgtcgctacggctgagcggcgcgtgacaaagggggcaactgtatgacatgacggctccggtgttgctgaaagggcgaaagtgtagcgctattcgcccctgcagaccactgttacagcgccggcccctgtgggtggctatcgtgcattacgatcagattctccgccccttgcggcatgccgtccggcatgacgttctccagccgcaggacatcgcccatgatctggctgaagaccggcgcggacacagcgccgccgtaataggaaccattgctcggatcgttcatcaccaccaccagcgcgaactgtggtcgactggcgggcgccacgccggcggtataggccacatacttatcgatatatttgccgtccgggccgattttcttcgccgtgccggtttttaccgccacccggtagtcgcgtaccgccgctttggtaccgcccccgcccgggagcgccacgctctccatcatatgttccacgctatgcacaatactctccggcatcacccgcgtgcccatcaccggcggatcgatgcgggtaatcgacagtggtcgcgcaatgccgaagccgccgatggtggcgtagacgtgggcgagctggagcggggtgaccatcaaaccatagccgaaggcgaaggtggcgcgatccagttgcccccagtagcggcgatgcggcatcagcccggcgctttcgccggtcaaccccagccccgtcggttcgccaaagccgaaagctttataggtatcgatcagatgctgcaccggcatggcgagcgagagatgggacacgccggtatcgctggatttctgcaggatcccggtcaggctcagctccggataatagcccacatcgcgaatacgatggccatcgaggacgaacggatgggtatccaccacgctgtctggctggacaatcccctgctgtagcgcagtcatgatcaccagcggtttgaccgtcgacccgggctcgaaggtgtcgctgatggcccggttgcgaaaatcatccagcgtcgcgctatcgcgattgttcggattgaagtccggatagctggccatcgccaggatctcgccggtatcaattttgatcaataccgccgccccggactctgctttgttccagcggacggcgttgtcgagggcgtcttccgtcaccgtctgcaggcgttcatcaatactcagctgcagattatgcgccggaaccggcggcacttcggtaatgttctcaatgacattgccatgtttatctttacgcaccagacgtcgcccgggtttaccggtcaactgggcgttaaagcttttctccaccccttcgatgccctgattatcaacattggtaaagcccagcagattggcagccacgtggcccgccgggtagaaccgtcgcgattcatcgcgcaggtagacgcccggcagatgcagtttatcaatccactctgcctgctcgggattgatctgacgcgccagatagagaaagcgagcgtggggatgactctgtacccgctgggccagctctccgaggttgaggtgcagcgcttcggccatcgcctgccagcggggtccatagcccacaccgcccttctccatagtggtctgcgggtcgatccagatagcactgaccggaacgctcaccgccagcggccgtccttcccggtcgctgatcatcccccgctcaaccgctacgggttcttcgcgcagggagcgcatatcttcttgttttaccaggttatcgggggagataatttgtagccagcccacgcggaccagcagcagccccagacaaccgagaatggccacacacagtaacccgaagcgaatcggggtgaaactggcggcggacttcgtttttttctttagcaccatagctccggcattgttttgcaaccaactgatttaacagaaaattagcaaaacagactgctacacaatgctaataaagatgagtatttgcaacaagacgcgacgggagggggaaaaatgacatgctttgcaataaaaatgcaaaagccccgcgcaggcgaggcttttatacaagaagagtggtcttgtatcagatagcagttacgttaactgcagccggacctttctggccgtcctgaatttcgaactcaacgttctggccttcagccagagttttgaagccgttaccctggatagcggagaagtgtacgaacacgtctttgctgccatcagccggagtaatgaaaccaaaacctttagactcgttgaaccacttaacttgacctttaatctttgccatttgcaaaattccttagactgttttcttcgcctgctggcgtttacctagataaaactgacacataactgcatgaggcactaatttaaggttcggcagagaagcggtattcaacgacaacgtgtttactcaggacttctttactgaaaatgccacacataaacagaactgtacctcgtttaacccgaaacgtgttatcacacactacgtaaataatggcaagccatttttaaacgtgtctcgatcgttcgcacaaattataaggtaatcatttgatcgcctgcacatttatgcgtctttgccgcccctggcaaggcgctacagcatcagccaatatcgcccattcgctgcctcattactgcaacttttttaccatagctcaacaacttcgcttcgtccaggtatgtccgtacacgaactgctgtgatgtaagcgtctggtgggcaacggtgaatattgatgcgcataattcgttataactccagactaaaaatcgctaagccgtgccagtgtagtgataataaaacctgttagtcgtcacgctaaaaatagtgctaattctgcaccttaataatgaaaaaaagatgacagtgtcacgttacccaacaataaacgcggcgagaatgactttatttacagcgtgtaataaagaggatattgcactaagaaaggaataatggaataagaataagatattaccgtccgctatcatgcaggtgcgcatcttatgatgcacacctgtcgggcaccttaacgttcagctaccaggcggataaactcatcctcccctttcgccttgccggcgacggtcggctcagccacatcctctttctctggcgcattagcttcgcacaggcgacgtaacagcgcattctgccgcttttgctgatccagcagcgcttgcagcagctctatctgctcattggcccgcgaactggcgcggttgacgaagaaccataacaacagaccgacaagcagcagcgccacggacacagccagcgatgccagatttaaaatcccaggatttagtaactcactcatttcaccacctcaaagagaaggcgttcattctaccacccgcggcgcagaaggaaatcagtcggcagaaaaatgtcttaccacggaataaatttattaatagtgcaaatgccgctgaaaaactgaacatcctggtcgcacattacgttaagcatctgagtccacagcaacaggcagcctgctatgatgactatcagtaaaacccaccgtaattttttcactccactctccgcatcagtacgcaatgtcgccaggatagcacggccttcttaaaccgcggctaactgtattacgaaaggtaagtttaggaatcatcgacttgtttcaaaacgtgttcgtgtcaaaatcaagccagggatcatacaaataatgaggcatcaatgcgattaatcattcgtactattatcttggtggctatcttatggattggcgtattattgagcggttatggggtgttattccacagtgaggaaaacgtcggcggtctgggtcttaagtgccaatacctcaccgcccgcggagtcagcaccgcactttatgttcattccgacagcggagtgatcggcgtcagcagttgccctctgctgcgtaaaagcacaaccgtggttgataacggctaacatcgaaccggcgatcgcgacgtagcgccgcggtcgccaacccggtatccgccgcctcagaacggatagtcgttgtatcccatttgttcagaaatcttacgcgccgcctggtggagcatcgccacgtattcatgcaagcgttcttcagagaaacgtagcgttgggaatgagatgctcagcccggcgatgaccacgccgaaacggtcaaacaccggcacgccaatgcagcgcagcccctcttcctgttcctcattatcctcgccatagccctgctcgcgaacgccatccagcactttcagcaactcctcggtgctggtaatggtccgctcggtgctgcgcttatactccacgccgtcgaggatctgctccacttcgctgcgatcgcgccatgccagcagcaccttgccaatcgcggtactgtacagcgggttgcggcggccaatacgcgagtacatccgcaggttatacatcgagtcaattttatggatgtagacgatactgtcttcatccagcgccccaagatggatggtctctttcgtcagtcgcgaaagttcgcgcatctgaatatcggcgctgcgcaccaggtcgacgttctgcagcgcgcgcgcgcccagttcgaacagcttgagggtgagagagtatttctcagactctccttcctgtgccacatagcccagtgatttcatggtctgtaaaaagcgataaacggtgcttttcgacatcatgacgcgctgggacagttcggtaatgccaatttcacgctcttcacccagcgcctgtaggatgccgaaaaccttcaataccgaagagacagaatctggctgtttatccaaatctgcacctgccatttatcacctcgtcgtaactgttttataaaaattagaaccggtttttattataaattcgccgcctctgagccgcaatcattcttctgccacttcgttacaaatctgcgacatactgcgaattaatcaatgctaaactcatcattcaaaaaaccgtttcatttaagactcatattcaccatggataaaaattcttctgatggcgtgccgttgccgcaacgctatggcgccattctgaccatcgtgcttgggctgaccatggccgtgctcgacggggctatcgccaacgtcgcgctgccgactatcgccagcgatctcaacgcctcaccggcggcttcaatctggatcgttaacgcctaccaaatcgccattgtcatcgccctgctgccgctctccttcctcggcgacatggtcggctatcggcgtatctataagataggcctggtggtgtttacctttacctcgctggcctgcgcgctgtcgcgtagcctcgaaatgctaaccttcgctcgcgtcgcgcagggattgggcggcgccgcgctgatgagcgtcaacaccgcgctgatccgtctgatttatccgcagcgctttcttggtcgcggcatgggcattaactcctttgtcgttgccgtctcttcggcggccggcccgactatcgccgcagcgatcctctccctcgcctcatggcaatggctgtttttaattaacgtgcctctcggcatcgtcgcttttgttctggccatgcgctttctgccgaccaacagcgcgcgcagcaaaatcatccgcttcgatctgccgagcgccattatgaacgcccttaccttcgggctgctgatcaccgccctgagcggtttcgcccaggggcagtccactcagctggtgctggcggaggtcgccgctatgctggtggtggggttcttcttcgttcgccgccagctcacgatgcccgtccccctgctgccggtcgacctgctgcgtatcccactcttctctctctctatctgcacttccatctgctccttctgcgcgcagatgctggcgatggtctctctgcccttttttctgcagtcgatgatggggcgcagcgaagtggagacgggtctactgctaacgccgtggccgttagcgaccatggtgatggcgccgctggccggctatttgatcgagaaatgtcatgccgggctgctgggggctatcggtttgctgattatggcctgcggcctgttcggcctggcgctgctgccctcgtcgccctccgatctggatatcatctggcgcatggcgctgtgcggcgccggcttcgggctgtttcagtcgccgaacaaccataccatcgtcgcctcggctccgagccatcgtagcggcggcgccagcggcatgctgggcaccgctcgcctgctcggacagagcaccggcgcggcgctggtggcgctgctattcaatttgctcggtaacaacggcacccacaccgccctgctgctggccggcaccctggctatcgtcgccgcgctaattagcggtctgcgggtcactcagccgcgcgcagcctgacggacggtaaaaaaaatccgcagcttgcgggctgcggattttcgttttcagcgtcagaagatagattatttcagatattcaccgctacgcagggcttcaatacgcttatccagcggcgggtgagtcataaacagttcgctcatggatttcgctttaccgttaatgcagaacgccatcatgctgctggcttcctgcggctcatagctggttttcagacgctgcagggctgcaatcatcttctcgcggcctaccagacgcgccgagccggcgtcagcatggaactcacggtaacgcgagaaccacatggtgattatgctggccagaataccgaacaccagctcaagcaccgtggcgacggcgaagtagatcagcgggttgccattgctgctctccccttcatcttcccggttgccgccgaggaaaccggccgcaatctgcgcgataacgcgggagataaagataacgaaggtgttcaccaccccctggatcagggtcatggtaaccatatcgccattggcgatgtggctgatttcatgggcaatgaccgcttccgcttcatcacggctcatgttttgcaacagcccggtgctgacggcgaccagcgaggcgtcacgacgcgcgccggtggcgaaggcgttaatgtcaggcgcgtgatagatagctacctgcggcatggcaatacctacctgctgcgcctgctgcgcaacggtattcatcagccagcgttccgtttcgttgcgcggctgctcgatcacttccccacccactgacttcagcgccatccacttcgacatcatcagcgaaacgatagaaccaccgaagccgaacagcagggccataatcagaagaccggtcatgctgctggattggatccccgtgaggcttaacaccagcccgaacacgaccatcactgccaggttcgtcagcaggaaaagcgcgattcgcatcataattttctttttacctcaatttaacaaaacgcactatgcgattacccacatcgtatgggtcaggctgcaattttcaaccatcagcccccgctaagtcacgataaaaacacaactttacattttgtagcatcttgctgacagcggcagcgcaggttgacattttgttagataagctgaatggcgatgacaacgcgcacaaaaaaacgggcacctctcagggtgcccgttagcaacttatttgctggccggcggttccaccgccgggcgcgctttttccagatgcgccaggtctaccgcgatatggaccgtttcatcaagatacggatccggctcctggtaatccttcggcagatcgtccagttttttcagcggcggcttgccttcgcgtttcaggcgatcgttaatccgcgccagacgaatcgcatcatcttcttcgttctctttctcacgctgggcgtagttcagagagacgatgttacgtttgtccttcatcgcgttataacgggcaatatccttcatgatgtactggaattcaggatcctgcgcaatacgctcgtcgtggcgcttgagcagctccggtccaaacggggtcagatccccggacttcacataggtggccgcgttgatgctatcccacggcagcgcgttgtcttcatactgctcgccggtttcgcgatcttcattgccggttggcatcatgatatccggcgtcacgcctttgcgctgcgtactgccgccgttaatacgatagaacttctggatggtgtactggacggaacccaacgccggccactccggacgcagcatttgatcgtaaatacgattcaacgagcgatactgctgtaccgtccctttaccgaaggtcggttcgccaacgatcagcgcgcggccatagtcctgcatcgctgcggcgaagatctcagacgccgaggcgctaaagcggtcaaccagcaccaccagcggccctttgtaataaaccacgccatcgttgtcgctgtcttcgcgcactttgccattattatcccgcacctgcaccaccggaccggacggaataaacagacccgaaagcgataccgcctctgtcagcgctccgccgccgttgctgcgcaggtcaatgatgatgctgctgacgttctgtttttccagcttctgcagctgcactttcacgtcatcggtcaggccaacgtaaaagcctggaatatccagcacgccgactttttctttcccgacggttttcaccgacatcttcaccgcacggtcttccagacgaatgcgctcgcgggtcagcgttacaatacgcgtcttggctcctttaccggccggcaggatttcaagacgaaccttgctgcccttcggccctttaatcagcgccacgacgtcatccagacgccagccgatgacatcaaccatcgacttcccggtctggccaacgccaacgatgcgatcgccgacgctgatcgctttgcttttcgcggctggaccgcccgccaccagcgaattaatgacggtatagtcatcatccatctgcagcacggcgccgatcccctcgagtgagaggctcatttcggtattgaactgctcggtattacgcggcgacagataatttgtgtgcggatcgatttcgcgagcgaaggcggtcatcgccagcgagaagacatcttcgctgttggtttgcgccaggcgacggatagcaaacttatagcgacgggttaaggtgtcgcggatctctttatcgtctttacccgccagcttcaggcttaactggtcaaacttaaccttagcgtcccacagcttgttcagctcggcctcgtcttttggccacggcgctttggagcggtcaaggttgaaattatcattgccggtaaagtccatcggacgttcaagcaccttcagcgcatactgatagcgctcgaagcggcgctgctgccccaggttgtagaggtcgtaaaagacgtccagtttcccgctgcgcagctcatcgccaatttggtcttttttagccgcgaacttcgccacatcgctggccagcagcacattgtggctgtagtccagcaggttcaggtaacggtcaaaaatctttgccgagaaggcgttgtcgagatcaaactgacggtaatgagagcgggtaaagcgcgacgtcacgcgctcgcttaccgtcgcgtgctgcggctcttctttcagcacggggatttgatctgcgcgggttatgtcatcaacagcgaatgcatggcctgctattgccagcaggcccgcaagcgcggtgattttaaaaaatgtgttcatgcctggcccggcctccgtttcagaacaccaggtgttctgcgcgtacaatcattgacataccagaagtcagctgtacacgaacgccatctttggtgatttccagaacggtggcgtccatggcgttattgcctgcttttaccttcagcgcctggccgacggtcagaacggaaacatccgataccggagtaagacgctcttcacgcggggctttggccgcaacaggacgcggtttacgctgttcagcgccttctttacgacgcggctgctgaggacgcggtttacgctcgcggcgaacgccttcatcctgctggcctgcggccgcagcggcttcgcgttttttcgcctgctgggctgcgcgctgcgcctgaacgcgagctttcgcttcttccagctgctgacgcgcatgggcaatgtgctgctcttccagttcgccgcacggattgccatccaggtcaacgcgaatagcgccggcttttacgccgtacagataacgccagctggacgtgtagagacgtaatgcagcgcgaagctgggtcttgctgagattcatctcaccacccactcgctcaacgagatcctgaaaaattccgattttcagggggcgcgcttcaccttcagcgctaaagcactgcgggaaacgttcggccagaaaggcgataacttctttactgctattcaacttaggttgattttccatgaaatttcctgattacaacggacgtagccaacaagccgcaggcatgaacaggcgacattataatgacgtcctcgctaaatgctacgttatccgttgattatcccacgacacgggtaaagattttttgataatccgtggccgcaatgagtttttccagatgctcgaccagcgtgcgcaacccctgctcatcttcagcggtgaagcgcccgtaagccggactatcgatatccagcacgccgataatctggccattcacgcgcagagggaagacaatttccgaattactggcggcatcgcaggcaatgtggccgtcaaaggcgtggacgtcctcgacgcgctggacctgagcctgcgccaccgccgcgccgcatacgcctcgcccgaccgggatccgcacgcaggccagtttgccctggaacggtcccaacaccagggtatcgccttccagaaggtagaaaccggcccagttgacctcgctcagccgctcgaacagcagcgcgctggtattggcgatcatcgccagaaaactggtttcacctgccattaatgcctggaaatcgcggttcagatccgcgtaaaattctgttttgctcattatatcttcactttgttgtcttactgcctgatacgtacagcctactaaaataagcattaaatgcgcttgggctcaagatgaattcattcataggttaagatagtgagatacattcattcctgtacgtaataaatgccgataaaaacacccaccctcaaacctgcgaaaaagatggtcgtgcataccgtcagcacgccgcttccctatgcgcattatcagcgctgtacgcagtgtgacatgctcttccgcttaccggtgctcaaacgcaaccaaagcgcctggtgtccgcgctgtaacgcgaaggtgcgcgatggccgcgactggtcgctgacccgcctgggcagcatggccctcgcgatgctattgctcatgcctttcgcctggtctgaacctctgctgcgcctgcatctgttgggcgtacgcatcgacgccaacgtcctgcaggggatctggcagatgaccgcgcagggcgatccgattaccgccgccatggtactattttgcgcggtggtcgccccggtgctgctggtggtctccatcagctatctctggctgggcaatgtgctggggatgaacctgcggccggtgctgctgatgctcggcaagcttaaagagtgggtgatgctggatatctatctggtgggcatcggcgtcgcctccatcaaggtgcaggattacgccttcctgcagccgggcatcggtctggtggcgtttatctccctgacgttgttgagcatcctgacgcttattcatatgaacgtcgaagagctatgggagcgtttctatcccgagcgtccggcgacccgcgccgataataatctgcaggtgtgcaccggctgccattacaccggctatcgcgacgcgcgcggccgctgccgacgctgccacacgccgctgcatcatcgccgaccgcagagcctgcagcgcagctgggcggcgctgattgcctcgctggttttcctctttccggccaacctgttgccaatctccatcatctacgtcaacggcgcgcgccaggacgacacgatcctctcggggatcatctccctggccagcagcaatatcgccattgccggggtcgtgtttatcgccagtattttggtgccattcaccaaagttatagtgttatttaccctgctgctcagcatacaattcaagtgcgagcagggattgcgcacccgcatcctgctgctgcggctaatcacctggattggccgttggtcgatgctggatctgtttgttatctcactcaccatgtcgctaataaatcgcgatcagctcctcgccttcaccatggggccggctgcggtttactttggcggcgcggtaattttaactattcttgcagttgaatggctggacagccgcttactttgggacgcacatgagtcaggaaacgcccgcttcgcagactgaagccagaataaaaaccaaacgccgtatttcgccattctggctgctgccggtcatcgcgttgctgattgccgcctggctaatctggaccagctttgacgatcgcggatcgacgattacgattgatttccagtccgcgaacggcatcgtgccgggacggacgccgatccgctatcagggggttgaagtcggcaccgtccaggatattagcctcagtaaagatctgagtaagattgaggtttcggccagcatcaaacgcgatatgaaagatgcgctgcgcaaagagacccagttctggctggtcacgccgaaagcctctctggccggcgtatcgggcctcgatgcgctggtgggcgggaactacatcggcatgatgccgggcaagggtgaacccgaagatcactttgtcgccctcgacacccaacctaaataccgcatcaacaacggcgagctaatgatccacctgcaggcgccggatcttggctctctgaacagcggctcgctggtctacttccgaaaaatcccggtcgggcgagtgtatgattattccctgaatgccaataatcagggggtgaccatcgatgtgctaatcgagcgccggtttaccaatctggtgaaaaaaggcagccgcttctggaacgtctcaggcgtcaaggccgacgtcggcctgagcggggccaaagtgcaactggagaacctgtccgcgctggtgaacggcgccatcgcctttgactcccccgccgattcgcatgtcgcctcgcaaaacgatgaatatcacctgtatgaagatctggcgcatagccagcgcggcgtggtagtgaccctcgatctgcctgatggcgacggactgaaagcgggctcgacgccgctcatgtatcaggggctggaggtgggccagttaagcaaactgaatctaaaccccggcggcaaagttactggcgagatgaccgtcgacccgagcgtggtgacgctgctgcgggagaaaacgctgattcagatgaagaagccgaagctctccctcgataaccccagcattagcaccctgctcaccggcaatacctttgagctggtgcccggcgaaggcgagccacgcaatcacttctcggtaatgccggcggataaagcgctgctggatgagcccaacgtcgccaccgttaccctctcggcgccggagagctacggcatcgacggcggtcagccgctggtgctgcacggagtaaaagtcggccaggtgctggagcgtaaactgacggccaaaggggtaacctttcaggttgccattgaccctgaataccgcgatctaattcacggcgacagcaaatttgtggttaacagtcgtctggacgtcaaagtggggctcgacggcgtgcaggtgctgggcgccagcgccagcgaatgggtgaacggcgggatcagggtgatccccggcgaaaaaggcaaaatgcaaagcagctatccgctgtacgctaaccttgaaaaggcgcaggaaaatagcctgagcgaagtgccgaccactaccctgagcctgtctgctgagacgctgcctgacgttcaggccggctcggtggtgctgtatcgtaaattcgccgtcggcgagatcatcgccgtcaaaccgcgcaaggatgcattcgatatcgatctgcatatcaagccggagtaccgctacctgctgaccaacaacagcgtcttctgggcggaaggcggtgcgaaggtcaagcttgacggtaacggactcaccgtgcaggcctcgccgctggcgcgcgcgatcaaaggggcgatcagtttcgataacctcaatggcagcagcgccggagcacggctgaataacaaacgtatcctttatgcatctgaaacggcggcgcgcgccgtgggcggccaaatcaccctgcacgcgtacgacgccgggaagatggcggccgggatgccgattcgttatctcggcatcgacatcggtcaaatccagtcgctggagctaatcaccgccaaaaacgaagtgcaggcgaaagcggtgctctatccggaatacgtcggcaccttcgcccgcgccgggacccgcttctcggtgatcaccccgcaaatctccgccgcgggcgtggaacatctcgacaccctgttccaggcctacatcaacgttgagcccggccgcggcccggcacgacgcgattttgagatccaggatacgacgatcagcgattcgcgttatatcgacggcctgaacatcgtggtggaagcgccggaggcggggtcgcttggcatcggtacgccggtcctgttccgcggactggaagtcgggacggttaccggactgtcgctggggtcgatgtctgaccgggtgatggttaagctgcgcatcagtaagcgctaccagtacctggtacgtaataactcggtgttctggctggcctcgggttacagcctcgacttcggcctgattggcggggtggtgaaaaccggtaccttcaatcagtttatccgcggcgggatcgcctttgccacgccgccgggcacgccgctggcgccgaaggcccaggatggcaagcacttcctgctacaggagagcgagccgaaagagtggcgggagtggggcaccgctctgccgcagtaatgcccccttctcccgccccgggcaacgccgggcgcggggagaggataaaccgcacgccccggtgtcacgcgccggggcgtttgtgctaaactgcgcaccctttttttctgtggtgcgctgcccgtggctgaaaatactgtctatttccctgaagcgtttctcgctcaaatgcgcgcggcgatgccagcgcatctctctttcgacgactttatcgccgcctgtcagcgcccgctacgccgcagtattcgcgtcaatacgctgaagattagcgtcgatgatttcctctctctggttgccccctacggctggcagctcgcgccggtgccctggtgcgcagagggattctggatcgagcgagaggatgacgacgcgctgccgctgggcagtaccgccgaacatctcagcgggctgttctatattcaggaagccagttcgatgctgccggtcgccgccctgttcgccgataaccggcagcccgaacgggtgatggacgttgccgccgccccgggatcgaaaaccacccaaattgcagcccgaatgggcaacgcgggcggcattctcgccaatgaattctccgccagccgggtgaaggtgctgcatgccaacatcagccgctgcggcatcagcaacgtcgctctgacccacttcgacggccgggtttttggcgcggccttgcccgaaaccttcgatgccatcctgcttgacgccccctgctccggcgaaggggttgtacgtaaagacgccgacgcgctgaaaaactggtcgccggagagcaacctcgacatcgccgccactcagcgcgagcttatcgacagcgccttccatgctctgcgccctggcgggacgctggtgtattccacctgcaccctgaatcgtgaagaaaatcaatcggtcattgagtggctgctgtcccgctatccgcaggcggtggagatcctgccgctgggagagttgtttcccggcgcagccgacgccttaaccgcggaaggttttctgcacgtttttccgcaaatttacgattgcgaaggcttctttgtcgcaaggttgcgcaaaactgcggcgatcgatccgctcccggcgccaggctataaggtcggtaaattcccgtttacgccgctgaaggaccgggaggccgccgcggtaactgccgccgccagggctgttggcctggagtgggacgcaggccatacgctgtggcagcgggataaagagctgtggctgtttccgctggctttggagcccctgttcggcaaggtgcgcttttctcgcatcggcgtgcgcctggcggagctgcacaataaggggtaccgctggcagcatgaggcggttatcgcctttgccgcgccgcagcgggccttcgagctgtcgcaggaggaagcggaggaatggtatcgcgggcgcgacgtctatccgcaaaccgcgcctgggcaggatgaaaccattgtgaccttccagggcgtcccgctgggcctggcgaagcgcgtcggctcccgactgaagaacagctatccgcgcgaactggtgcgcgatggaaaactttttgccggcaaggtgtgaggccgcgcaaaaaatgcgcactttttgactggcgcttttcgccccattgactacgctgaaaaataacggccataactggtcgtaccacaactcagctgaaaaatggggtgaagcgatgagtaaaaccaatgtccgcatcggcgcgttcgaaatagacgatgccgaactgcacggtgagcatcagggtgagcgaacgttaagcataccctgcaaatccgatccagacttatgtatgcagcttgacgcctgggatgccgacaccagcgtgcccgcgattctcaatggcgaacattccgttctctaccgtaaacattacgaccgccagtccgatgcctgggtcatgcgccttgcctgacaccaatgaacccgtcgcctgagacgggttatttatttccccgtcccgccgtcatcccctacactaaatagtatgtgaacccgagcatgaggccaggatgtttgccttagtgttgtttatttgctatctggatggcggctgcgaggacattgtggttgacgtctaccgcgaggaaacgcagtgcttagtggcgatggaggatcagcggatccgccacggtggctgctacccgatagaagattttattgatggcttctggcaacccgccagcgaatacagcgacttttagcctgccgactgcagcgccaccagcgtcagcatcccaccaaacacagcgcccgtatcaatatagtgttgattatcgtggtcataacgcgcctgaagcggcgtatggccaaaccagaaatggtctgcgccgccaatagcgccatggcgccccgccaggtgttcactcagacgatggcggctccatagtacccgttggggatccaccggctgctgccagcgatagaccggcgccgggtaatcggcgtgggcgatcacatgccgcgctttcccgcattccacttcaataatcaacggtagccgccgacagtgcgccagcagccgatcgacgtcggcccgctgccgcgcatcgcccttgacgtaccagtcgccaccgttcatctgccagagccgcatatctccgctctccagcgcctccagcgccatctgctcatgattcccccgaacggtcctgaaccagcgacagcgcaacaggccaagacaatcggcgctctgcggcccgcgatcgatcagatcgcccaccgagatcagcagatcggcccagggatcaaagcgcaactgacgcaggcgattcatcagcagcgcaaagcagccatgcagatcgcccatcagccagatattacgccagtcgctgccgttaatacgttgatacatataattacctctcagcggtaattataggtaattccagcaaaggtccacggaatttaatttacacctcaatcaattttaaacagacggcaaatatagtccgccagaggattaagcttgtcagtggctcgctttaaaatagggggaaatcacaacgaggtgtttatcgtgacagacaatagcctgcattcatccggcgtgctagcgccgcgctcgcatcttattgccgatctggtgatgggcagattgacacctgcccccatctggcggcaaaaaaattaccgctttaagtttttgctgcgcacggccctattttataacgccaccagagcgatgctggaagcgctcagcgctcgggatgattttaatcagctgctggccgcgcaggctacgctgccgggcaaagtacaccgtcaatatctgacccgcgatctcaacgcctggcagcgggcggtggcggtaatcaaccattatcgctatatcgacaccctacgcggatcgcggctggcgcacgctatgaccgcggtgtctgaggtcccgctgctgacgttaaacggaaaagaggaccgccggtttactctttatgcctcctcggcaggcaaagccgaacgtgagggtgaaaccactctgtggctgcgcgacagcgaccacaccctgctggccagcgccaccttcagcgtaacccgtgatcacgatgcctggcagctggttatcggcggtctgcaggggccacgacgtcacgtttctcatgaggtgattaagcaggcgactcgcgcctgctacggcctgtttccgaagcgcctgctgctggagtttatctggcagctggccgctcgcagccaaatcgcggctatttacggcgtcagcgataacggtcacgtgttccgcgccctgcgctatcgcctgagcaaaggccgccatttccacgccagctacgacgagttctggcagtctatcgacggccagccggaaagcccatggcgctggcggctaccgctatgtctggaaagaaaatcgctggagagtatcgccagtaaaaaacgggctgaatatcggcggcgattccagctgctggatcagctgacggagcaggtggcaatattgacgcagcggcatgccggtgactaaattgcactgtcggtgaagccgaattacaacatggcgtttgcttattatgtcaatatttcgctactatcagggtccccgaaggccaccggatagtcgcttgcataatgagtaaaaccgaaatttttctgctgattattctggcggtcattctgctcgggagcatatggtttattttcagcgatgaaatttggctattgctctgctatctggaaagccagatataccctacattcagcgttccgcaataatattttccgcccgcaaaagtgctcgtcttattatttatgccacctcgtcagccggcgaggtgtaatcgcatgaattgccaaatcgtttagattttgcttattttatttatcatacaaatatgtatactagcaggcttccgatgttggcccgccagttaacctgcacgccgggcctgtttaggtgcaggttttttcttttctccgccctcgtttacggttccacctttgccacctccccttccacaggatgcgatttatgtgtaaatgaattgtgtatgctaaaaacggtgtgctataacgggacatccagaggccagcgggtgtttgactgacaggatgtcgctggctcttgagaaagaagacagataaagataaaaagagaccgaatacgattcctgtattcggtccagggaaatggctcttgggagagagccgtgcgctaaaagttggcattaatgcaggctaagtcgccttgcactataagaatagtttaacgcgtcagcttttccagtccgcggccaaagtggctgcataattcctggaaagggggcctctgccagcgaaaaaaccgccactgccgttgtccggcaagggcggtttttttgatgttattacagcaggatagcgagaaagtttagcagagcttctgcgctcgctcgataaagggcgcgaggctcattttttgtcccggatgctgcggatcgtcgatctggatcactgagatcggctgcgcggtggttttgccggctttgacctgctgctcagccacctcattgagcggatactgaaccagcgtgctcgggttgatggcgtaaagcgcgttacccggtcgacaggtcaacataacctcttcccggttgaacgcccagctctccttccccacctcaaaacggctcacggtgataatttgtggcgctgccagagcagccccggagcttgccagtaacaacatggtcagaacaatttttttcatgattttgccagttaattcaataaggttcccaggtggcaaacagactgacggccagcagcgccagcgcgcccagccctatttcagcctgcgtggttcgcaggatcaggctttccgcctgcgaaccgcttgccgacatgcgcggtaccagaacatacctgttcactaacgcaattaccaccatcccggcgaccagcgcacatttgatcaacaacatgcgtccccacggcgatgcgccaatcaatcctccctggatcaacagcgcattgagcgctccgctggcaatcgtgccggcgacggccagatgcccgtaacgtgaaaagcgcgccatggtatagaccgcggccggccgccagcgcccctgcgccaggcgcaggcaatagataaagggcaacagaccgccgaaccagctggcgacgcagaagagatgcacagcgtggtttgtccgctgcagcacgccggtgagaccatcgtgcatagcggcgtgccctaccccggcggaaagcagcagctgtgccgccagcagggccaccagctggcgggcgccgtgacggggacggatccacactaccgcaagcgcgatccacgccagtaggatctgccagatccacactccaccaaagcgggtcccggccaccgcctgccagacggcgggtcgccagacatccgtccagccttcgcccatcattcctccctgcaggagatacagcgccagcgtagagatcgcgccgatcagcagcagcgggcgcagtagtggataaaagcgcagcatcagcacgcgtctcagcggtaccggcgcccaccaggcgccatacagcacgcagccaaaagccagcatcagggagataaagtgcccaaagcgcagggtaatatagagcccggtcagcatcgcttacttcacgctaaaggtatattgccctttggttttatgaccatccaccgagaccacatgccatgccacggtgtactctcccggcggcaaggcttccgccaaaggtaacgtgacctcggccggattatcggcgctgcgggtcagttttccggtagccaccgcatgctgctgcggaccggtgacggtcacgccgctgaatgcgggttcaataccttcggaaaaactgagcgtcagcgtctgtggggaagctgaaagttgcgccccggcggtcgggatctgctgctgcaggtgagcgtgggcaaaggcgcccgccgcggttaacatcccggcaagcgcaacggagaggcgcaacgcgcgtccagcaagaagtcgcatattcgtcattcccttttgttatgtctgtagcacagagaataaccctgtataatgccagagtcgagccaggcatctggccctgaccggatttataagcagagtggagtggatgatggaaagaaatctggccaaaatttcgcaagatgagatggataaagtcaatgtcgatctcgccgccgccggcgttgcttttaaggagcggtacaatatgccggtggtcgctgatttagtcgagcgtgaacagcctgcacatctgcgcgactggttccgtgaacgactgatcgcccatcggctggcctccgtctccctttcgcgactaccgtgggagccgaaacagaaataatgcgcgctcgcctcctccccgtcggttggcaagcccggccaattccattacgcttattgttttgctctggagcgagccatgctgcgcgtcattgataccgaaacctgcggcctgcaggggggcatcgttgaaatcgcctcggtcgatatagtcgacgggcaaattaccaatcccatgagccatctggtgcgtcccgatcggcccatcagcccgcaggcgatggctatccaccggatcacggaagagatggtcgccgataagccgtggattgaggagattattccgcactatcatggcagcccgtggtacgtcgcgcataacgccagcttcgatcgccgggtgttgccggagatgcacggcgagtggatctgtacgatgaagctggcccgacgcctgtggccgggaatcaaatacagcaatatggggttatataagtcacgtaagctgaacgtgactacgccgccgggactgcatcaccaccgggcgctgtatgactgctatatcaccgccgcgctgctgctggatatcatcaatgtttccggctggacccctgacgaaatggccgatatcaccggtcggccggcgctgctgactacttttaccttcggcaaataccggggtaaggccgtcgccgagattgctgaaaacgatccaggctatctgcgctggttattcaacaatctcgaccgcatgagccccgaactgcgcctgacgctcaggcattacctcggggaatagcgcctacactgccgcttttcccggcagtgtcccctgcgccagggcgatgaaaaaggcgtactccagcgccaccccttcatagcttttaaagcgcccggattttccgccgtgtccagaatccatatcggtgcagagcagcagcaggttatcgtcggtttttagttcccgcagtttcgccacccatttagccggctcccagtattgcacctgggaatcatgcagaccggtagtcaccagcatgtggggataggcctgcgccctcacgccgtcatagggactgtagcttttcatataatgataataggtttcatcctgcggatttccccactcttcaaattcaccggtggtcagcggaatagtttcatccagcatggtggtcaccacatcgacgaacggcacctgggctatcacgccatggaacagctctggccgttcattcacggccacgcccatcagcattccgccggcgctgccccccatgccgtagcaaagccgcggatcgccgtacccctgggcaagcagcgcgtcacagacgtccagatagtcgttgaaggtatttttcttacacaggaatttaccgtcttcataccattgctgacccagctcgccgccgccgcggacgtgggcgatggcgtagacaaagccgcggttgagcaggctcagccggctggcgctgaaatcggcatcgatactctcgccatatgagccatagccatagaccagcagcgggttgctccctttgcgaaaatgttcgcgatggtagaccagagagaccgggacttcgacgccatcgcgggcggtcacccacaggtgttcgctctggtagcagctcgtatccagcccctttacctcctgctgtttgatcactcttcgttcgccggtatccatatccagttcaaacagcgtatccggcgtagtcatggaggaatagccgtagcgcagtcgcgacgtttcgggctccggattataggcaagccaggtgacataggccggatcgtcaaaagcgatccccaccacctcccgggtcttgcggttaatttgccgcagactggtcaggccacgctggcgctcttccacaaccagccagtcggtaaacagggtaaatccttcgagcatcacgtcgtgacgcggcgggatcagcgtggtccactgttcttcatcacgcagcacggtacggtagaggccgaaattcttcccctcccggttggaacgaagatagaaagcgtgctgatagtgatcaagactgtattcatgatctttacgccgtggcagaaagcagaccggctcggcgtctggcagttcggcgttgagcagcagcacttcgctggtggtggcgctggagagataaattaccacgaactgctgggaggtggttttatgcacgctgacgtagaaggtctcatctttttcctcgtagaccagcgcgtcgctctgcgccggtgtcccgacggtgtggcgccagacctgataagggagcagcgtggtgggatgtttacgcacataccaaacaaagcgtgaatcgttgctccaggcaaagccggaggtgacattttcgaggatttccgggtaccactcgccgttgctgaggtcgcaaaagcgcaggccgtactggcggcgggaaaggtaatcttccgccaccgccattagctggttgttgggcgcaatgcccagtccgcccagggtgtagaactcgctcttcgccgcccgctggttggcatcgagcaggatctcccactcatcccactcttctttcagcaccgactgccgctggtagatagcgtattcgcagcccggctcatacacctgacggtagcgaaagccgtttttactgtagggggcagagacttcccgctgcggaatgcggtcgataatctccttcagcagacgctcctgcaggctgagctgcgaatccatcacttgcttgccgtaagcgttctccgcgtgcagatactccagcacgtcaggtcgcgcgcgctcatcgtcgcgcagccagtaataattatcgatgcgtgtatcgccatgcaaggtcatggcgtgagggatccgtttagctttaggtggcatgttattcttctgctgctttatcgtgacacaagagcattcaggccgcagggtggcgcctgaatgatgacgtgtctataagggtggcaaaagacgcgagcgatgcaagcgaaacgtgatgatttagacgcttagcgcttgtttttgtgactggatatcctgttctatatcggcccggacatctttcggcagcgccagggcgtctcccagcgcattaaggtagctacgctccataaaatggtcgatatcaatcaccgcgcagctgacgtagtagatctccagcgcctcctgcgggtcgatgatgccctcggcgagacgctgcggatccagcggctgggccagcgcctggtcaattagcacccgggcctgaacgtcaatattggccgcccgcagctgagtttcaatattcgcccgctcgtggtcatcaatatgaccgtcgcttttcgcggcaaataccagggccgtgatcagccgcacgctgcgcggatcgacatccgtcggcgccgctgccgtctcaggcgcctgggcggacgtattctgcgcgcgcattttctgctgatacttgttccataacaccgtgcccgccaccgccccgccgcctgccagcagcgcgctagtgccatatttcgccaacaatttgcgtgacgatttgctggccaccagcaatccggccagcccaccgatggcgccgggcagcaggccgctcccttttgacgactcgccggacggtgacgcaccctgctgcccgagcagcgactgcagttgatgtagccagttagccatggttttcctctcaggtgacaaacactgttatcagcctaaacgacgcgatgtcaggaaatgttagatatggctaaagatgcgcaaaggtacgtgcgacggcagcatcggagccgaccgaccagtgactgaccgccagcgttcaggctgccctggctttgcgcgctttggccgccggcacggcgtcatcacccgccggagaagtctcggcggtagccgacggcgcggaggcgtcctgtgcgggcgtctcttgctccggcagtcggccaactcgcaggatatgctgcagcgcttctttacgctccgccagccacatcgccatggtatcgcgctggacgtcatccatctccagcggcgatgccaccagccagtcattcagcacctctgccagatcgagcattttgtcgtaagcgtcggcctcttttttgctggcaaaagacattttttcctcaccttcgcggatcaccacatatttaatttcaaccgccatactgcagcctctcaacactgtatttttatacagtatagcaaatttccctcccggactcaactcacgcgcgttacgcgcgtaaagacatacgcaaacgttttcgtttataatcgctgccatctttttttactgcggatgagagttatgactgtattaggcaccgcgctgcgcccggcagccaccaaagttatgctgttaggttccggcgagttgggtaaagaagtcgctattgaatgtcagcgtctgggcattgaaaccatcgccgtagaccgctaccccgatgccccggcgatgcaggtcgcccaccgcgcccacgtcatcaatatgctgcacggcgagagcctgcgcgccctgattgaacaggaaaaacctgattatatcgtgccggagatcgaagctatcgctaccgacaccctggtcgaactggaacaggccgggcagaaagtggtccccacggcgcgggcggcaaagctcaccatgaaccgcgaaggcattcgccgcctggcggcggaagagctgcagcttcccacctcccgctatcgttttgccgacagcgaagaaggcttccgcgcggcggttaccgagatcggtttgccatgcatcgttaaaccggtgatgagctcctccggcaaaggccagagctttatccgctcggctgaccagctcagcgaagcctggcgctatgcgcagcagggcggccgcgctggcgccggacgggtgatcgtcgagggggtggtgaacttcgatttcgaaatcaccctgctcaccgtcagcgctgtcgatggcgtgcatttctgcgctccggttggccatcgtcaggaagacggcgattaccgcgagtcctggcagccgcagcagatgagcgacctggccctcgagcgtgcccaggccatcgcccgcgaggtggtgctggcgctgggaggttatggtctgtttggcgtggagctgttcgtatgcggcgacgaggtgatcttcagcgaagtctccccgcgaccacacgacaccgggatggtgacgcttatctcccaggatctctcggaattcgccctgcacgttcgcgccttcctcgggctacccgtcggcgctatccgccagtatggtccggccgcctccgcggtgatccttccgcagttgtccagccagaacgtcagctttggccagctgcagtcggccgtcggggctggcctgcagctgcgtctgttcggcaagccggagattgacggtacccgccgcctgggggtaaccctcgccgtcgccgattcggttgaggaggccgtggcgcgcgctaaagccgccgccgcggcggtcatcgtcgaagggtaaagacaaaaaacccggtcgcgttgccgcagaccgggttgttgacctggaggcgtggtttatttcgcgccttccaccgcttctcgcgcgagggtggtgatgcgatcgtagtcgccggcttcgagggcgtcggctggcaccagccaggaaccgccgatgcacagtacgctgttcagcgccaggtagtcacggtagttggccggagagataccgccggtcgggcagaaacgaatgtggccgaacggacccgcaatcgcctgcaaggctttcacgccgccgttggcttccgccgggaagaatttaaactctttcaggccatactgcatacccagcatcagctcagataccgtgctgatccccgggatcagcgggatggtgccgtcttcggtcgccgctttcagcagggattcggtcagacccgggctgatagcgaactgcgcgccggcttccgttaccgctttcaactgctcaacgttggtaaccgtgcccgcgccgacaatcgcgtccggaacttctttggcaatcgcgcggatcgcctccaaggcgcactcggtgcgcagggtaacttccagcacgcgaacgccgcccgccaccagcgctttcgccatcggtaccgcgtgttccagctttttcactacgataaccgggacaaccggaccggaggtgaggattgcttctgctgttgttttccagtttttcatcaggattttctctcgccagatctagaaattaaatcgtcttaaaaagtgatgcaggttgcgccctgctccgcgccagagagcttctcacgcagcgccccaaacatctcccgaccggttcccacgcgcgatgcgctgaggtcagggatatgcggctgacgcgccgccagttcggcctcatccaccagcagcgtcagttcccccgtctgtccgttcacgcgaataagatcgccatcgcgcactttcgccagcaagccgccatcatacgcttcaggcgtgacgtgaatggctgacgggactttaccggaggcgccagagagtcggccatcggtcaccagcgctattttgaaacggcggtccaataatacaccaagtggcggcataagtttatgtaattctggcatcccgttcgcttttggcccctgatgacggaccaccaccacgcagtctttgtccagcagccccgcttcaaaggccggcaacacgtcgtgctggctctcgaataccaccgccggcgcttcaatcacctggttctccaccgggaccgccgaagttttcattaccgcgcgtcccaggttgccgctcagcaccttggtgccgccgtggcgggagaatggtttttcaaaggtcgcgatgacctggtcgtccaatggcgctgtcgccccttcgcgccagtccagctcgccgttattcagccatggctccagggtgtagcgcgacaggccaaagccggccacggtgtgaacatcctcatgcagcaggccgcctttcagcagctcgcgcaccagtaccggaacgccgcctgccgcctggaagtggttgatatccgccgggccgttgggatagaggcgcgccagcagcggcaccacgtctgacaggtcggagaaatcgtcccagttaatgataattcccgccgcgcgggccatcgcaaccaggtgcatagtgtggttggtggagcccccggtcgccagcagcgccacgatgccgttgaccaccactttttcgtcaaacattttgcccagcggcatccactcattgccgttgccggtcatgcgggtgacctggcgcgcggcggcggcggtcagcgcttcccgcagcggagcatccggatggacaaaggacgagcccggcagctgcatgcccataaattcgaccaccatctggttggtgtttgccgttccgtagaaagtacaggtccccggcgcgtgataagaggcggcttcggactccaggagcgccatacggtcaactttcccttctgcatacagctggcgaatgcgaaccttctctttattcggcaggccgctggccatcggaccggagggaataaagaccgacggcagatggccaaatgagagcgccgccatggtcagaccgggaacaattttatcgcagaccccgagatacagggccccgtcgaacatgttatgcgacaggccgatggcggcggacatagcgatcacctcgcggctcaggagtgaaagctccatcccgtcctgcccctgcgttacgccgtcgcacatcgccggcacgccgccggcgacctggccgaccgcattggcgctgtgcagcgctttgcggatgatctccgggtagtgttcatagggctggtgagcggacaacatgtcgttgtaggaggtgatgatggcaatgttgttgcgcaacatgctcttcagggaggctttgtcgtcagcctggcaggccgcgaatccgtgagccagattgccgcaggccagttgcgcacgatgcacggtgtcggttttggcctggttaatccttgcgaggtaagccgcgcgggtgtcacgcgaccgttcgataatgcgatttgttacccgtaacattgtcgaattcataaaggctcctcaaatttttatctgtccggccgctgcgtgatgacgtgttgacgtggtaaaggccacaaacaccagcgctcaggggcaaaatgtctgcaggcagtgtaataaaaaaagccccgtgggtgaatcctcacggggcttaaaagattaaaaagcgtgcgactttctgcgtcagatcatgttaccggtaaaataaccctgacggattagcctccagccttactcgaactcgttccatgaacgaccgtcgcgagtgatcatggccaccgacgcaaccggtccccaggtcccggcctgatacggtttcggcgcatcgcggtcggctgcccaggcttcggtaatggagtcaacccatttccacgcctcttctacttcgtcgcggcgaacgaacagcgcctggatgccacgcatggtctccagcagcagacgttcataggcatcggccagatgcgtctggttgaaggtttcggagtagctcagatccagtttagtgatctgcaggttatgtttatgatcgaggcccggcactttgttcagtacctggatatctaccccttcgtccggctgcaggcgaatggtcagcttgttctgcggcagctcctgccaggtctctttaaacagattcagttccggggttttgaagtaaaccactacctctgagcatttggtcggcagacgtttgccggtgcgcagatagaacggtacgccagcccagcgccagttatcgatatcgacgcggatcgccacgaaggtttcggtgttgctggtcttgttggccccctcctcttcgagatagccaggcacttttttgccctgggcaaagccggcggtatactggccgcgaacggttttctcgcgcacgttggagcggtcaatacggcgcagggatttcagcaccttgaccttttcatcacggatgctgtcggcgctgagatcggacggcggtgacatggcaatcatgcacaggatctgcagcaggtggttctggatcatgtcgcgcatctgcccggcctggtcgaagtaaccccagcgcccttcaatacccacctcttccgcgacggtgatttcgacgtgatcgatggtgcggcagtcccagttattgacgaacagggagttggcgaagcgcagcgccagcaggttgaggaccgtctctttaccgagatagtggtcgatacggtagacctgacactcttcaaaaaactcgccgacctggtcgttgatttcacgggaggtttccagcgaggtgccgagcggtttttccatgaccacgcgcgcaggcttggcattaagcttcgcttcgcccagccctttacagatcgcgccaaaggtgctcggcggcatagcgaaatagttgatggtgacacggttcttttgatccagcatctcacccaggcgggtgaagccgctggtgtcattgacgtcaagattacagaactccaggcgtccgctcagggtatcccacaaaccttcatcaattttttccttcatgaaggtttccagcgcttcgcgcacgactttggtataagccgctttatcccagtcggcacggccgacgccaatgattctggtgtcagcgtggatctggcccgccttttcaagctgatacagggaaggcaacaatttacgccgcgccaggtcgcccttcgcgccgaaaatgaccaggtcgcatgcctgggccgtttgcgttaccgccatgtcattctcctcagttgatagtctggtgcttttgccaggctatatttgtaattttcttacactgcactgtactgtgtttacgtatttcccgaaagccttccccttcgtttgcggcggtaaaaccgcacagggtgaaaacattcggcgatgatttgggcattcggccgttattgttcgttgtttgtacctggttcaggtcagtaaaatacgaccctgatcatgtaatgaaaaaaaacaacatcatttcacgtcattcctcaccgcttgcgcttgcggaggggtatattcttgctaaaacgcccaatgatttcacccattaatgaaatcgtttccattgatgagcgccctgttactaatgaacatgctggaaaaaatccagtcccgactggaacaccttagcaaatctgaacgcaaagtggcggaagtgatcctcgccacccccgagcaggccattcattcgagcatcgccgccctcgcccttgaggccggcgttagcgaaccgaccgtcaatcgcttctgccgtagtctcgaaacccgcggattccctgacttcaaactgcatctggcccagagccttgcgcacggcacgctctatgttaaccggaatgtcgatgaagacgacagcgttgagtcatacacgggaaaaatattcgaatcggccatggcgagtttagatcaggtgcaccattctctcgacatgtcggcggtaaatcgcgcggtggatctgctgactcaggccaaaaaaatcgcctttttcggcctcggctcctcagcggcggtcgctcacgacgcgatgaacaaatttttccgctttaacgtgccggtcatctattccgacgacattgtcctgcaacggatgagctgtatgaattgcgatgacgatgatgtggtggtgattatctcgcataccggaagaaccaagagcctggtggagctggcgcagctggctcgtgaaaacgatgccatggtgatcgcgctcacctccgccggtacgccgctagccagggaagccacgctcgccattacccttgatgtgccggaagataccgacatctatatgccgatggtctcccgtttggcccagttgaccgtcattgacgtgttggcgactggctttaccttgcgtcggggggcaaaattcagagataacttgaagagggtcaaggaagcgctgaaggaatcgcgttttgataaagaaccattcgtacccagtgataatcaataaaagttgataacaagcagtaccccattacaccttcgataacgatccggctgtgcgacgttgcaggctggcgctaccgaatccatgttcacgcaacaccaaagttgtatcagtcaacggagtattacatgtccagaaggcttcgcagaaccaaaatcgttactaccttaggcccggcaactgaccgcgataacaacctggaaaaggttatcgccgcgggcgcaaacgtagtacgtatgaacttctctcacggcaccccggaagatcatcagctccgtgccgacaaagtgcgtgagattgcggcaaaactgggccgtcatgtggccatcctcggcgacctccagggaccaaaaattcgcgtatcgaccttcaaagaaggcaaaattttcctcaacgtcggcgataaattcctgctcgacgcaaaccttggcaaaggcgaaggcgacaaagagaaagtcgggatcgactataaaggcctgccggcggacgtcgtgccgggcgatatcttattgctcgacgatggtcgcgtgcagctgaaagtcctcgaagttcaggggatgaaagtgttcactgaagtgaccgtcggcggcccgttgtccaacaacaaagggatcaacaagctgggcggcggcctgtctgccgaagcgctgaccgacaaagataaagctgatatcgtcaccgccgcaaaaatcggcgtcgactacctggccgtctctttcccgcgctgcggcgaagacctgaactacgcccgtcgcctggcgcgcgatgccggctgcgatgcgaaaatcgtcgccaaagttgagcgtgccgaagcggtttgcgatcaggatgcgatggacgacgtgatcctcgcctccgatgtggtaatggttgcccgtggcgacctcggcgtcgagatcggcgatcctgagctggtgggcatccagaaagcgctgatccgtcgtgcccgtcagctgaaccgttccgtcattaccgccacccagatgatggagtcgatgatcaccaacccgatgccgactcgcgcggaagtgatggacgtggccaacgccgtgctggatggtaccgatgcggtgatgctctccgcggagaccgctgccggtcagtatccttcggaaaccgtggccgcgatggcgcgcgtgtgtctgggcgcggaaaaaatccctagcctcaacgtctccaaacaccgtctggacgtccagttcgacaacgtggaagaagcgattgccatgtcggcgatgtatgccgccaaccacctgaaaggcattaccgccatcatcaccatgaccgaatcgggccgtaccgcgctgatgacttcgcgcattagctccggtctgccgattttcgccctctcccgccacgagcgcaccctgaacctgaccgccctctaccgcggggtgacgccggtgttcttcgacagccagaatgacggggtggccgccgcgcacgacgccgtcaatctgctgcgggacaaaggctatctggtctccggcgacctcgtggtcgtgacccagggtgacgtgatgagcaccatcggcagcaccaacaccacccgtatcctcaccgtcgagtaagcacggtagagataaaaaagcctcctgacggaggctttttttatttctttttcgggaacagctctttgcgtttatagggctcgatttcacccggcttgcgcgttttcagcagcttcaggatccaggtatactgctcggtgtgcggcttaacaaacacttccacttcttcgttcatccgccgggcgatggtcgtatcgtcagcgtccagcagatcgtccatcggcgggcgcaccagcaccgtcaggcggtgcgtcttgctatcgtagaccgggaacagcggtacgacgcgggcgcggcacactttcattaagcggccaatcgccggcagcgtggccttgtaggtagcaaagaaatccacaaactcgctgtgttcggcgccgtgatcctgatcgggcagatagtagccccagtagccctgacgcaccgactgaataaacggtttgatcccatcgttgcgcgcgtgcatacgcccgccaaaacgacgacgcacggtattccacacgtaatcgaacaccgggttaccctggttatggaacatcgccgccatcttctgcccgccggaggccatcagcatcgccgggatatccacaccccatgcatgcggaacgagaaaaatcaccttctcattattgcgctgcatctcgtcgatgatcgctttcccctgccagtcaacgcgggcaaggattttctgcggatcgcgcaggcccagctcggccatcatcaccatcgcctgcggcgccgaggcatacatggcgtcgatgatcgcttcccgctcgtactcgcttttttccgggaagcagtacagcaaattaatctgcgcccggcggcgcgagcttttcgccagacgccctaccagacgaccgagtttgccgaggagcggatcgcgaaaggatggcggcgtcagcgcaataccggcgaaggcaaagacccccagccaggcgccccagtagcgcggcagtaaaaaggatttttcaaacttagggataaactcaatattattttttttcgtttccatgcccaatccgcagatcgactgcttaatcaagataatgggatagtgtagcgagacgtcgggtatcctacaaaagaaaaagccggcgccctggggcaccggctttccactgaccggtggttagtcaaaccgcagctgcggaacgacctctttgacctgcgccagatagtcggtccggtcggaaccgctcagcccttcggtacgcggcagcttagccgtcagcgggttgaccgcctgctggttgatccacacttcgtagtgcaggtgtggcccggtagagcgtccggtattccccgacagcgcaatgcgatccccgcgcttcactttctgccccggcttcactaacagcttacgcaggtgcatgtagcgagtggtataggtgcggccgtggcggatcgcgacgtaatacccggcagcgccgctgcgtttggccacgactacttcaccatcgcccaccgccagtactggcgttccctgcggcatcgcgaaatcgacgccacggtgcggcgcgacgcggccggtgaccgggttcagacgacgcggattaaagttagaggagacgcggaactgacgcgccgttgggaagcgcataaagcccttcgccagacccgtcccgttgcggtcgtagaatttgccgtcttcggcgcggatggcatagtaatccttaccgtcagagcgaagacgcacgccgagtaactggctttgctcacgtttgccgtcgagcatttcgcgcgacatcaataccgagaattcgtcgcctttcttcagcttacggaaatccatctgccactgcatggccttgatcaccgcgctgatttccgtgctggtcagcccggcatcacgcgcgctggagacaaagctggcgccgacggtgcccttcagcacgctgttgacccaatcgcctttctgcagctcgctgctcattttaaaaccgttatccacacgggtataggtgcgggtctcgcggcgggacatctcccaggtcaggctctgcagatcgccgtcggcggtcagggtccaggagagctgctggccaatcttcaggttgcgcaactctttatcggcggaggaaagctgggcgatatcgcccatatcgataccgtactggttcaggatgctgctgagcgtatcgccggtcgacaccacgtattcgtgcccgccggcatcgctatcggctttttcgtcgagctcatcctgaggaatggcttcttcttcctgtggggcctgatcgatcggctcggaggcttccggcagcagggagcggatctcgcttttttccagttcaatggttctgacgatgggggcggattccgggtggtaaatgtagggtcgccagacggcgaccgctaaggtaagaacgctaagcgaccccagcatgacgcgatgaggtcgtggcaaattgttgaatgcctgagtgacagcgcgggctatctgttgcacgtattcacttcctcgttaatctcctttcaggcagctcgaatactgattcgccagttgggtgaggaattgcgggtaactcgttttacccagcgtaattcctgtccccagtggatccagggtccccatgcgcacagacgtgccccgggcaacagcttcgataaccgctggcctgaactgtggctcagcaaaaacgcaagtggctttctgctcaaccagttgtgttctgatttcgtgtaaacgctgcgcaccgggctgtatttcagggttgacggtaaagtgccccagcgaggtcaaaccgtagtgtttttcaaagtaaccgtaggcgtcatgaaaaacgaaatagcccttccctttcagcggtgccagctcattgctcacctgcttgtcggtcgccgccagcgcggtctcgaactgctgcaggttgctgtcgagtttggctcgactctgcggcataagttccaataatttatcgtggattgcaaccgccgaaagccgcgctatctctggggataaccacagatgcatattgtaaataccgtgatggtgatcgccgtcacctttttctgctgcgccatggtcatgaccatggtgatcgtcatcgtcgtccgccccggtgatgagcagcggtttgaccccatccagcacggcaatcgtcacctttttattcgccgcaatgctttgcgtcgacttatccataaaggcttccatttccggaccaatccacaccactaagtctgcgttctgtaagcgttttacatcagaaggacggagggaataatcatgctcggaggcgccatcgggcagcagcacctgggtctcggtcaccccatcggcgatggccgccgcgataaagcccagcggtttcatagaagtcaccacggcggcgctggccagcggtacctgcgcgaacaaaaaaacagcgccaagtccagcgcaaagaagcgtatttttatgtaacataatgcgtctagtcatcgaaataagtgagtgtgatgtgatattataacattcactagcttgtgcaacccctaaattactatgacaaaccttgtaacgctggaaaatgtctcggtggcctttggccaacgccgcgtgttgtctgacatctcgctggctctcacgccaggcaaaatcttaaccctgctgggccccaacggcgccggcaaatcgacccttgtgcgggtggttctcgggctggtagcaccgacagagggtgttatcaagcgtgacgcacgcctgcgcatcggctatgtgccgcagaaactgcatctggacgccacgctgccgctgaccgttagccgcttcctgcgtttgcgcccgggcacccgtaaagacgacatcctgccggcgctgaagcgcgtgcaggcggggcatctgatcgatgcgccgatgcaaaagctctccggcggcgaaacgcagcgcgtactgctggcccgcgccctgctcaaccgtccgcagctgctggtgctggatgaaccgacccagggtgttgacgtcaacggccaggtggcgctctacgatcttatcaaccagctgcgccatgaactggactgcgcggtgctaatggtatcccacgatctgcatctggtgatggccaaaaccgacgaagttttgtgcctgaaccagcatatctgctgctctggcgcaccggaggtggtctccatgcacccggagtttatctccatgttcggcccgcgcggcgcggaacagctggggatataccgccaccaccataatcaccgccacgaccttcaggggcgaattgtactgcgtcggggaaacagccgctaatgattgaacttctgttacctggctggcttgccgggatgatgctggcctgcgccgctggtccgctgggctcctttgtggtctggcgccgcatgtcttatttcggcgacacgctggcgcatgcgtctctgctcggcgtcgctttcggtttattgcttaacgtcaatccgttctatgcggtgatcgccgtgaccctgctgctggctggcgggctggtgtggctggaaaaacgaccgcatctggcgatcgataccctgctgggcatcatggcgcacagcgcgctgtccctggggctggtggtggtcagtctgatgtctaacgtccgcgtcgatctgatggcgtatctgttcggcgatctgctggcggttacgccgcaggacctgatcgccattgccactggcgtggtgattgtgattggcattctgctctggcagtggcggaatctgctggcgatgaccatcagtccggacctggcgtttgtcgacggcgtgaagctgcagcgggtcaagctgctgttgatgctggtcaccgccctgactatcggcgtggcgatgaagttcgtcggggcgctgatcattacttccctgctgattatcccggccgccaccgcccgccgttttgcccgtacgccggagcagatggccgccgtggcggtgggcgtgggcatgctggccgttaccggcgggttaaccttctcggctttctatgataccccggccgggccgtcggtggtgctctgcgccgcggtgctgtttattctcagcatgacgaaaaaagccgccagctgaaaatgaaaaagcccggtcacgctgctgaccgggcttcaccatgaactgctcaaccgcaacgcgctacggcatttccggcggcgtaatcccgaaatgattccaggcgcgcaccgtcgccattcttccccgcggcgtacgctgcagaaagccctgctgaattaagtagggctccagtacatcttcaatggtttcccgctcttcgccaatcgcggcggcgaggttatccagccccaccgggccgccaaagaacttatctatcaccgccagcagcagcttacggtccatatagtcgaacccttccgcatcgacgttaagcatatccagcgcctgggcggcaatatcggcggagatggtgccgtcgtggcgcacttccgcaaagtcacgcacccggcgcagcagacggttggcaatacgcggcgtgccgcgtgaacggcgggctacttccagcgcgccctcgtcgctcatctccagccccatatggcgggcgctgcggctgacaatatgctgcagatcggggatctgatagaactccagacgctgcacgatgccaaagcggtcgcgcagcggcgaggtcaacgaaccggcgcgggtggtggcgccgatcagggtaaacggcggcagatcgatcttgatggaacgcgccgccggaccttcgccaatcataatatccagctggtagtcttccattgccggatagagcacctcttccaccaccggcgagaggcgatggatctcatcgataaacagaacatcgtgcggttcgaggttggtgagcatcgcggcgagatcgcccgccttctccagcaccgggccggaggtggtacgcagattcacccccatttcattggcgacgatattggccagggtggttttccccaaccctggcgggccaaaaatcagcaggtgatcgagggcgtcgccgcgcagcttcgccgcctggataaagatctccatctgcgaacgcacctgcggctggccgacatactctgccagcaattttgggcggatggcgcggtcagcggcctcttcaaagccgctgctgtctgccgataccagccggtctgcttcaatcatcccttacctcacaacgcagcgcgcagcgcttcgcgaattagcgtttcactgttggcgtccggacgcgcgatcttgctgaccatccggctggcctcctgcggtttatagcccagcgcgaccagcgcggcaaccgcttcctgctcggcatcgtccgccgttgggcctgccggcgaggtcagcaccagatcggccgccggggtgaacaggtcgccgtgcagccctttgaagcgatctttcatctcaacgatcagacgttcagcggtttttttgccaatccccggcagcttcaccagcgaggcgacctcttcccgttcaacggcgttgacgaactgctgcgccgacatgccggagaggatcgccagcgccagcttgggccccacgccgttggttttaatcaactctttaaacagggtacgttcctgtttgttgttaaacccatacagcagctgggcatcttcacgcaccacaaagtgggtgaagacgatcgcctcctgcccggcctccggcagctcatagaagcaggtcattggcatatgcacttcatagccgacgcccgccgtttccagcaacaccagcgggggttgtttttcgagaatgatgcctctgagtctgcctatcacgtggggctcctgcgttatggtctaagtatctggcggtatcataaaaaaaggctggatagatatccagcctgatttgcgattatcgtaagcgcccccgcgccagattgagccgggtctcgctgatctgagcggcattctggctgacatggcaatgggtgatggcaatcgccagcgcatccgccgcatccgcctgcggattggcgggcagcttgagcaaggtgcgcaccatatgctggacctggctcttttcggcgctgccaatcccgaccacggtctgcttgacctgacgggcggcgtattcaaacaccggcagcgcctgattggtcgctgcgacgatcgccaccccgcgcgcctgcccgagctttaacgccgagtcggcattcttggccataaagacctgctcaatggcgaaatagtcgggctggaactgggtgatgatctccgtcaccccggcgtagatcagcttcagccgcgacggcagatcgtccactttggtgcggatgcatccgctgcccaggtagctcagctgccgcccaacctggcggatcacgccataaccggtaacgcgcgaccccgggtcaatgccgagaataatagccatcacgcgcctccggttaaccgtggatgcggctgcatcacagggtggctgcgacctcgtcggagatctcgccgttatggtacacttcctgcacgtcgtcgcagtcttcgagcatatcgatcagacgcagcagcttcggcgccgtctcggcatccatatccgctttggtggacggaatcattgagacttcggcagcgtcggctttcaggccggcggcttccagcgcgtcgcgcacagcgcccatctcttcccaggcggtgtagacgtcgatggcgccgtcgtcataggtcaccacgtcttctgcgcctgcttccagcgccgcttccatgatagtgtcttcatcgcctttctcgaaggagataacgcctttcttgctgaacaggtaggagacggaaccgtcggtgccgaggttacccccggttttggtgaaggcgtgacgcacttccgcaacggtacggttacggttgtcggacagacattccaccatcaccgcggtgccgccaggaccgtagccttcataaatgatggtttccatgttcgcgtcttcatcgccgccgacgccgcgcgcgatggcgcggttcagggtgtcgcgagtcatgttgttagacagcgctttatcaacggccgcacgcagacgcgggttggaagccggatcgccgccgcccagacgcgcggcggtgaccagctcgcgaatgattttcgtaaagattttaccgcgtttggcatcctgtgccgctttgcggtgtttggtgttggcccatttactatgacctgccataaaaaactctccaaaaagcgcgccctttcaggcggcgttaattacaaattcttcaatcgcctgccggttgctccacgacttggtcagcgcagcggcttccgtcgcgctgacccagcgataggccagatgttcggtgaaagtaatctcccgctcatgaggcagcgcaagacagaaccagaattccgtattgcgctctacacccggcgcatagcgatgacgcaaatgagaaaatatctcgaactccaccgtgcgctgacagtcgattaaggtcagttgctcgcaggcaacgtcaatggcgacctcttcctttacttcacgcgcggcggcctgcagcgcggtctctccagcttccaggctgccggtgaccgactgccagaacgcgggatcgtcgcgccgctgcaacatcagcacccgtttcgtatcttcggcgtaaatcaccaccagcaccgaaacgggcagcttaaatgacatattacttgttctccagagacgcttttgcctctttctccacaacctgaatacccagttcaccgagcgccgcaggattggcgaagcttggcgcttcggtcatcaggcaggcggccgcggtggttttcgggaaagcgataacgtcgcggatgttatcggtaccggtcagcagcatggtcagacggtcaagaccgaaggccagacccgcatgcggcggcgtaccgtacttcagtgcatccagcaggaagccgaatttctcacgctgttcctgttcgttaatgcccagaataccaaatacggtctgctgcatctcgccgcggtggatacgcaccgaaccgccgccgacttcataaccgttaataaccatatcgtaggcgttggctacagcctcttccggggcggctttcagctcatccgcggtcatatctttcggcgaggtgaacggatggtgcatcgccgtcaggccgccttcgccgtcgtcttcgaacatcgggaagtcgatcacccacagcggcgcccatttgctctcgtcagtcagactcaggtctttacccagcttcagacgcagcgcgcccagcgcgtcggccactactttcttgttgtcggcgccgaagaagatcatgtcaccatcctgcgcgccggtgcggtcaaggatcgcttccacgatttcagcggtcaggaatttggccaccgggctgttgatcccgtccatgcctttggcacgctcggtcactttaatataggccagccctttcgcgccgtagatcttcacaaagttgccgtattcgtcaatcagcttgcgggtcagagaggccccgcccgggacgcgcagggccgccacgcgccctttcggatcgttggccgggccggcaaagaccgcgaattccacagacttcagcaggtcggcgacgtccaccagctccatcgggttacgcagatccggtttatcggagccatagcgacgttcggcttcggcgaaggtcatgatcgggaactcgcccaggtcgacgcctttcacttccagccacagctgacgcaccatcgcctccatgatctcacgcacctgcggcgcggtcataaaggaggtttccacgtcgatctgggtgaattcaggctgacggtcggcacgcaggtcttcatcgcggaagcatttgacgatctgatagtagcggtcgaagccggacatcatcagcagctgtttgaacagctgcggcgactgcggcagcgcgtagaatttgcctttgtgcacgcgggaaggcacgaggtaatcgcgggcgccttccggggtggctttagtcagcatcggggtttcgatgtcgaggaagccatggtcgtccataaagcggcgcacaaagctggtaattttcgcgcgggttttcaggcgctgcgccatctccggacgacgcaggtcgaggtagcggtatttcagacgcgcttcttcggtgttgacgtgattggagtccagcggcagcgattctgagcggttaatgatcgtcagatcggaagccagcacttcgatagcgccggtggccatgtccgcgttgatgtttttctcttcacgcgcgcgaacggtgccagtgacctgaatgcagaactcattacgcagttcagaggctaacttcaacgcatccgcacgatccggatcgaaaaacacctgaacgatgccttcgcggtcgcgcatatcgataaaaatgaggctaccgagatcgcgacggcggttgacccaaccacacagagtcacctgctgcccaacgtgggactgtcgaagctgtccgcaatattctgtacgcatgagatatcccttaacttagccgtcggcggattgtcgtctgccctgcaggcgacgaggtcgcagctttagctgatgtcacaactgaatgaaaaaaggcggctattatactggaaattctgtcgttcgataagtccgacgcacgatgtacgctgctttgctgcgcgcttaacgtccacactcacataaattaacaaaatttgttactcttttgctgaagccgcaaaggtattgtagccgcctgacaacagatgaagatacggggataccatgttagaactcaatgcaaaaaacacggcgctggtggtaatcgatctgcaggaaggcattctgcctttcgccggcggcccgcatcgggctgacgaggtggtggcgcgcgccgctcgcctggcagacaagtgccggcaacagggttcgccggtcatcatggtccgcgtgggctggtcggccgatttcgccgaagcgctgaaacagcctgtcgacgctcaggccggggcgcatacgctgcccgaaaactggtggacctacccggccacgctgggtaagcaggagagcgatatcgaagtgaccaaacgccagtggggcgcgttctatggcaccgaccttgagcttcagctgcgccgccgcgggatcgacaccattattctctgcggcatctccaccaacatcggcgtcgaatccaccgcccgcaatgcctgggagctgggttttaacctggtcatcgccgaagatgcctgcagcgccgcctccgccgagcagcatcagtgcagtatgacgcatattttcccgcgcatcggccgggtgcgcagtaccgaggagatcctcacggcgctatgatttatattgggcttccccagtggtcgcacccgaaatgggtgcgccttggcatcaccagccttgaagagtacgcccgccactttaactgtgtggagggcaacaccaccctgtatgcgctaccgaagccggagattgtcgcccgctggtatgaacagactcacgatgacttccgcttctgcttcaaatttccggccaccatctcgcaccaggccgccctgcgccattgcgacgagttaagcagtgaattttttgcccgcctggcgccgctggcctcgcgcatcggccagtactggctgcagctgccggcgacgttcggtcctcgcgatctccccgcgctatggcattttctcgacggactgccgaaggatttcacctacggcgtcgaagttcgtcatcccgagtttttcgccaaagaggaagcggaacagcagctcaaccgcgggctgcacgagcgtaacgtcaaccgcgtgatcctcgacagccgcccggtccatagcgctgcggccaccagtccggcgatgatcgatgcccaacaaaagaaaccgaaggtgccggtacatgcggtgatgaccgcccgacagccaatggtgcggtttatcggcggtgacgatatggcccataaccgggaactgtttcgcgtctggcttcagaccctggcgaagtggcatcagtcggggaccccgtggttgttcctgcataccccggacattgctttcgccccggcgctggtggataccctgtggggtgacctgcgcgctgccctgccggcggcaggaaatgcgccgtcgattccgcagcaatcttctcttttctgatatcctgctatcatatccggagccatctgccagagttaaagggagttttcgtatggtcagcgcgctgtatgccgttttaggtgcgttattgttagtgaagttctcatttgacgtggtgcgtctgcgcacccaataccatgtaggctacggtgacgggggctttagcgagctgcaggttgccatccgcgttcacggcaatgccgtcgaatatgtgccgattggcctcattttgctgttatttatggagatgaacggcgctcagacctggatggtgcacgtttgcgggattttattaattgtcgggcgactgatgcactcctggggttttcatcaccgcgtctactactggcgccgctccggcatgagcgccacctggtgcgcgttgttgctaatggtgctggccaatctctggtatatgccctgggagttggttttctccctccgttagcgcacaatacgccgttttcgttttttcgggtttaacgttatgtctcaccgcgatacgcttttttccgcgccgattgccagcctcggcgactggacctttgatgaacgggttgctgaagtcttccccgatatgatccagcgttctgtgcccggctactccaatatcatctcgatgatcggcatgctggccgagcgcttcgttcagcccaacactcaggtttacgatcttggctgttcgctgggcgccgccaccctctccgtgcgccgcaatattagccatccggactgtcgcattatcgccatcgataactcgcccgcgatggtggagcgctgccgtcgccatattgacgcttataaagcgccgacgccggtcgaagtgattgaaggggatatccgcgacgtgaccattgaaaacgcctcgctggtgatcctgaactttactattcagttccttgagccgggcgatcgccaggcgatcctcaataaagtctatcaggggctgaatccgggcggcgcgctagtgctctcggaaaaattcagcttcgaagacgcccacgttggcgaactgttgttcaatatgcatcatgactttaagcgcgccaacggctacagcgaactggagatcagccagaaacgcagcatgctggaaaatgtgatgctgacggactccgtcgaaacccataaagcccgcctgcgtcaggctgggtttgaacatgccgaactgtggttccagtgctttaactttggctcgctggtggccgtgaaagccggggagcaggcatgatcgacttcagtaacttctatcagctgatcgccaaaagcccgctgtctcactggctggagacgctgcctgcccaggtagccgcctggcagcgcgatgccctgcacggcaagtttcgtgaatgggagcgcgccgtagaatttctgccggagctaacgccctggcgtctggatcttctgcacagcgtcaccgccgagagcgaaacgccgctcagcgaaggccatcagcggcggatcgaaaatctgcttaaaaacctgatgccgtggcgcaaaggcccttattcgctgtacggcatcaatatcgataccgaatggcgatccgactggaaatgggagcgcgttctgccgcacctgtccgatctcactggccggactatcctcgacgtgggctgcggcagcggctatcacatgtggcgaatgatcggcgccggcgcacatctggcggtcggtatcgatcccacccagctgttcctgtgccagtttgaagcggtgcgtaagctgctcggtaacgaccagcgggcgcatttgctgccgctgggcatcgagcagctgccggcgctggaggccttcgacaccgtgttctcgatgggggtgctctaccaccgccgctcgccgctggaccatctgtggcagctgaaagatcagctggcgccagggggcgaactggtgctggagacgctggtggttgaaggagatgaaaatacggtgctggttccgggcgaccgctatgcgcaaatgcgcaacgtctattttatcccctcggcggcggccctgaaaatgtggctggagaagtgcgggtttattgacgtgcgtatcgtcgacgcctgcgtcacctcgacagaggagcagcgacgcaccgaatggatgacgaccgaatcgctggccgatttcctcgacccacaggatcagcgcaaaacggtggaaggctatccggcgccattacgggctgtgatcattgccaccaaaccggaaacccagcagtcgctggcgaaaaaagcgagataaaaaaaggcccctgtttaatgggcaggggcctggtacgggcaatcatcatattgggcgacatgatgtgcagcaaaaaaccgtttaacttctccaggcggagataatccttttcatctccgccaccgctgcgccattcacggcgtagcgtctgtattcatcggcatcgggatcggctgacatcgaaacgcccggatgacgaaagcgcatttccgacggcaaccagtggccagccgagctatggacctctttcacccccgcctgcagaaacagcggcaggttcgcggcgcggactcccgcaccggccataatgattggagtatcccctgcggcaataagttccgtaattaatgaaatacctttctccgccgaggattgctgaccggaagtcaggatacgtttgacccccagcgtccccagcgttttccaggcctgacgcgggtcagcgcacagatcgaacgcgcgatgaaaggtcaccgccagcggcccggccgcggccattatttttttcatccgcgggatatcgacctggccatcagcatccagcacgccggtcaccagcccgggaaagcccagatcccgcaccatgcgaatatcgttaagcatcgcggcgaactcttcctcggtgtagcagaaatcgccgccgcgcgggcgaacgatcggatgcaccgggagagtaatcgcctcgcgggccgagaccagcaccccataagagggggttaatcccccttcctgcggcgcggcgcagagctcaatacgatcggcgccgcagcgctcagcctcccgggcgcacgccacgctgtagcaacacacttccagtaccgccattcctctctccctgatccagacaacctttgcagcatgtcacaatttcacgcggcagacgccgcgcggcttcacactgttacgtatcggcttgctcgctggcgacgatttgttcaatagaccacggatgaaatttgaccgtcacgctgccgtcggtcaccgccagggtaggattcggcaggcgctcatgctcccctttcggcgagctggttttgaccacgatccccggctggctgagtccgtcatcggccagcagcgccagagcgcgggcatttaaggttgccggatcgccgggcaggacgatttcgatatgctcccagccttcatggggataacgcttttcacccggccacggcagctcaacgatatggaagcgccagtgcgccacgcagaccggctccgccagtttgaacaggcaaatgggccggccgttgatcatattctccgacagcagggtgccgcactgctccagaccgcggcgccagcgttccgcagtggtattctgatgacagcgcagggagatatggtcggcgtcgagcccggcgatctccagtcccagtcgcgcagtgaagcgctgaagcgcatcggaaaatcgcgagagatccgccgtaatatcggccagttgttcattttgctgccagtttgccatgggtttgctcgtcaataatgctcgtcagtaatgaaaaggtaatttaccgtgtttcggcctgcggaccaaccgccgccccgctgatgggcaactgaccggcgatggattgcgcacgccggcgcgccgcgcgcaatgctgacggacggggacaaatgcagtatactcccgccctaatttgtccacattatggcgccgcctccctcgggggcaggcgcattacacgtaaggtattccggtgaatattcaggctcttctctcagaaaaagtcagccaggccctgatcgcggcaggcgcgcctgccgattgcgaaccccaggtccgccagtcagcaaaagttcagttcggcgactatcaggccaacggcgtgatggctgtcgccaaaaagctgggtatggcgccgcgacaacttgcagagcaggtactgtctcatcttgacctcaacggcattgccaacaaggttgaaatcgccgggccgggctttatcaatattttcctcgaccccgcgtttctggcggacaacgtcaaccgcgcgctgcagtctgagcgcctgggcgtcacgaaaccgcaggcgcagactatcgtcgtcgactactcggcacccaacgtagcgaaagagatgcacgtcggccatctgcgttcgaccatcattggcgatgcttcagtccgtaccctggagttcctgggtcataaggtgatccgcgccaaccacgtcggcgactggggcacccagttcgggatgctgatcgcgtatctggaaaaacagcagcaggaaaacgccggcgaaatggccctggccgacctcgaaggtttctatcgcgaagcgaaaaagcactatgacgaagacgaagccttcgccgagcgcgcgcgcagctacgtggttaagctgcagggcggtgatgagtacttcctgcagatgtggcgtaagctggtcgacatcaccatgtcgcagaaccagatcacctacgatcgcctgaacgtcaccctgacccgcgatgacgtgatgggtgagagcctgtacaacccgatgctgccggggatcgtcgccgatctgaaagccaaagggctggcggttgagagcgaaggcgccaccgtggtcttcctcgatgagtacaaaaacaaggaaggcgaaccgatgggcgtcatcatccagaaaaaggatggcggctacctctataccaccaccgatatcgcctgtgcgaagtatcgctatgaaacgctgcacgccgaccgcgtgctctactacatcgactctcgtcagcaccagcacctgatgcaggcgtggaccatcgtgcgcaaggcaggctacgtgccggactccgtgccgctggagcaccatatgttcggtatgatgctggggaaagacggcaagccgtttaaaacccgcgccggcggtaccgtgaagctggcggatctgctggacgaagcgctggagcgcgcccgtcgcctggtggccgagaagaacccggatatgtcggctgacgagctggaaaatctggcgaaagtggtgggtatcggcgcggttaaatatgccgacctgtcgaaaaaccgcaccaccgactacgtcttcgactgggataatatgctggcgttcgaaggcaacaccgcgccgtatatgcagtatgcctatacccgcgtgctctccgtgttccgcaaagccggcatcgacgaaaacgcgatgatcgacgcgccggtggtcatcgccgaagatcgcgaagctcagctggccgcgcgcctgctgcagtttgaagagaccctctccgtggtcgctcgcgaagggacgccgcacgtgatgtgcgcctacctctacgatctggcgggcctgttctccggcttctacgagcactgcccgatcctcagcgcggaaagcgaagagacccgcaacagccgtctgaagctggcgctgctcacggcgaaaaccctcaagctgggtctcgataccctcggtatcgaaaccgtcgagcgtatgtaacaagcaacccggcgaaagccgggttagttttattcggcgcctcgccagcggggcgccctgctcagaagtacttgcgtagatactccgtcagacaaaggatcgccatcgcctgaccgtagggcatcgaggtaagcgggatctggcgataaaagtcgaggtctgaccccatcccggtgccaaatgaggtctgcagcagctccccctgcggcgaaatattctgcacaatcccgcgaatcgctttttcagccaccccggcgtagtgctgcccgacgtaacgcttgcgcaccgctttgagaatcccgtaggcaaagccggcggtcgccgaggcctcaagataagagtgcgggtcgtccagcaaggtatgccacaggccgctgtcgtcctggcattctgctaaggcggcaatctgtgcgtcgaggactgtaatcagatagcgccgtaccgcgttcccctcggggagatccaccagttccagaaaatccgggatcaccatggtgagccagctgttgccccgcgcccaacgcgcccgggcaaagttatgccgcccctcatagttccagccgtgaaaccacagcccggtctcccggtccatcaggttctgcacatggagcaggaactggtaggttgcctcctccacatactgggggcggttaagcagcttgccaattttggctaacggcaacacggtcatcatcagcgtgtcatcccacatttgctgatggttctcctccgccagagtcatgtgctgcataccgccctgctcggtgcgcggcatctcgtgcatcgcccactccgcccagctctccagccacggcagatacgccatacggccggtctcttcaaagcggtaagccagggtcagaaacggggccatagtattgacgtttttggtcgttgctccctcggcgaagcggtcggcaaaccagcgatcgatgatatcacgcatctcgatatcgccggtttgctggtaatactgatagatgccgtacagcccaacgccgtgggtccactcccagccggcccagcctttggtatcgatcacgcgcccgtcatccaggcgtagtaaaaattgcccgctctcatccttaatattcaccaggttttgcgtcacgttgcggatcagcgcctgcagttcgctacgggcgataaaacgctcaggctgacgcagtaatgggctatgtttgaccggccaaactttcatgttgttaacctcgggtatatgtcgaattcaaagcgccgcccttaatgagcgccggggcagcaggtttatgacgattcagatagccaatattgttattgccccacagacagtcgtaaggcatccccgccagcagctcgaccaccgcgcggtgttccgcactggtctgttccgactgcgcgtagccgagctcgcgcattctgagggtctcgctgcgcaggacgctgtgggtgtgcaggttgagcttgaagcgcagcgagacgaggaagccgcaggctaacaccaccagagtgccgacgctgaggatcagcagaatggtatggctgaccccttcaggctgtattttttgcccggaaacaaaccccgacaactgcataatgatccccaccagcatcaccgcccccgcctgcgaggctttgcgggtcagagtcatgatgccggcaaaaatcccctcccggcgctggccggtgatcgcttcgtcgacgtcggcaatataggtgtaggtattccacggtacgtaatttatcccgccgcgtcccagtccggcgacagcagagatgagcagcaataaggaatagacgtcgctcagtccggcgtaatagagcagcgcgtaggagagtgagctcaggccaaacaggaccaccaccatgcggtacgacggcgcggggccaaaacgaatgcacagcgggatcatggcgattactgcaataaactggaagatggccatcgtccccagcaggttcgaggcgacggcggcttcctgcatcagaacaaagaccacgtaataggtaaacacggcattgaagacgtcctgggcgatatagccccccagatacatgccgaggtgctggcggaaaatttttatccgcagcgtagaactcagctcaatcaccaggcgattgaggctctgagcaagggttaagttttgtttttccgcttccgcccgcagggccgcttccgaccacgcctcccgcggtcgttcccaggtgaaacaccagaccagagtcagcatcaccgcgcacagcaccgagaacaccagactggcatagaagaacgagctggcattatctttgccgagccaggagagaaggatccccggcaggaaggaggctaaaatcgccgacatctgcgccatcgaaatgcgcgcgccggagaatttggttttctgtttaaagtcatcggtcatctccggcaccagcgtctcatagggcaccagaatcatggtatagaccatatcaaacagcagataggtcgccaggtagtaccagaagcccatctcgccgacccacatcgctgaatagctgaatacgcaggggatgccgagcagaataaagaattttctgcggccgaagcgcttaccaagccaggtggtgccaaagttatcggtgagaaagcccatcagcgggcttaccaccgcgtccagcacgcgggcggcagcaaaaataagcgtggcctcaatcggggtcagtccgcaaaaggtcgtgtaaaagtagagcagccatgcggcggttagcgccgtcgtgccggcgccgagaaaatcgcccgcgccgtaggccagatagttagccagtccaatttttcgtgttttcatcgccgtgatcctgtgtctttttttaaaagaacgccgacaatcgttccggatttgccaccggaagggagtgggtacctggctacactaaaagctgtgaaaggaggttacctttgtacttttgccacggaacagtcgccggtggcaaaatgacaaagagatgacgtcgccacttcactcatttataaaacagcatttctctttaatcaaaagacaggttcattgatgtgatctggctggaaggtcgccgactgacgaacaggctcgcaaatcccgggatcggcccttgcgcagtcggggaaacaggagtaaagaatggaagaaagggttattccgcgtatctcaaggaggccagatgccttatacccatctgctggttgccgtcgcgccaacgccggagagtcaggtgttaattaaaaaagcggtgtcgatagcccgccccgttaacgcgaaagtgagcttaatcactctcgctacggatccggagctgtataaccagttcgccgcaccgatgatggaaaatctgcgcgaagtgatgcaggaagagacgcgggagtttctcaatgagctggctcgccacgcggactacccaatagaaagaatgaccatcgcctgcggcgagctaggccatcatattaaggacttctgccggtcacaccgtgttgatctggtgatctgcggcaatcacaaccattccctcttctcacgcgccacctgctcggcgaaaaatatcgtcggcagctgcggcgttgatgtcctgttggtttcccttgaaaagggctaacgccggttagcccttttcctgaactaggccagtttagggaaggtggctatcttcccccgcagacggctctcctcgctgcgcggtgaaatatgctgcagatcctcgacaaagcgcgcctgccagttatgaatatcattttctctgatcacgtccagcatcgctgaatgacgggcgatacgttccgccagcggcatgctgagcgcgcgatccagcgcggcggcaacctcgtcgcgatcgtaaggattgacgatcagggcgctggtcagctcctgcgccgccccggcaaactgcgacaggaccagtacgccagggttatccggatcctgcgccgcgacgtactccttcgccaccagattcataccatcgcgtagcggcgtcaccagcccgacgtcagagtagcggaagaccttcatcagcagcttacgatcaaaatgctgattcagatagtagagcggtgtccagccaagctgaccaaactgtccgttgatgcgtccggctgcggtttccagctggtggcggatatcctgataggcctgcacatcgccgcgggaggtcggcgcgatctgggtataacggattttgccgtggtgctgagggtacttctcgagcagcgtctcgtaggcgaggaatcgctccggcaaccctttcgaatagtcaagacgctccacggagaagatattcttcacatttttcagctcgttcttcagctgggccagcttcggcggcagcggacctttagcgttgcgcgtaatttcgtccggatcgatccctatcggataaacctcggtactgaacgccttaccccatgcctgatagcgtttatccccgaggtcggataggcgagtctgcatagcaatgctgtcgagaaaagcggttctgtcgctttcggtctggaagcccagcagatcgtaatcgcacagttgctccagcagctcagcgtgcggcggcagagcgttaaaaatctccggcgtcgggaacggaatatgtaagaaaaacccgatgcgattgttcaccccgcgcttgcgcagctcgctggcgaagggcagaagatggtaatcatggatccacagcgtatcgtctggctcaatcagcggcagaagcttgtccgccagcatggcgttaacccgcagatatccctcccaggcttcgcgctgaaagctgaccagatcaaggcgatagtggaaagccggccacagcacggcgttagagaactggttgtagtattcatcatggtcccgttcattaaggttgaacgacgcccaggaaatattcccgcgggagacctgcttgagcggctgctggtcatcgccaatctcgccgctccagccaaaccacagaccccccgccgctctcagtgcccccaggatgccgacggccagaccgccagcgctcgattttttatcgtccggtaaggcgatacggttagagactacgactaaacgactcatggtcatccctcctttcggtttgcgcgtcatacgccagatgttgcaaccacgtccttacagcggcggcatccgccaaccgccagtgcgcctgagtttccccggcgccaacttttaccgacattccctgcagttgattaacgacgctgaatcccgcctcgtcggtcaaatcatcgccgacaaaaaccggttcgcggccggcgaatggcgcctcctgcatgaacgcggtaatcgcctcccctttgttgacgccgcggggtttaatctccaccacgcacttgccaagctgtaacgccagcagcggatagcgctgaacaatccgctgcgccagctccagcacggcgctctgctgctgcggggcctggcgatagtggagcgcgaaagccatctctttactctccagctcacatcccgggagcgcttccagcgccgacgtcagctcagccgcgatctcatcgcgcagcgctgtcggcagagagacgatgtaggttttaccattgatatcacggcgctcggccccgtgaacgccggccagcggtagccgccagggatgggttagcgcgtcaagttcagccattgagcgccctgaaatcaatgccaccgcgcccccctgctgctgagccagcgcattgagcgcctgcagcgtgctgtcgggtatcaccacctgatcggggtgcggctggatatcggcaagagtaccgtcgaggtcaaagaaaaaagcgtagtttccggttagcgcaggcggtacagatatctggttatccaccctgtttcctccttatcatggccagccgaagctggttgttaattatatgtgagccatgtaagtatagacagtgtgaccaacctcgccatttttgatagttaccgccagcgaaacgggcgctggcggcaattactctgtaaactaaaaagttcggtttaaattcaggccgcacgtttggctttttgtttgtagcggtcgaagatcaccgccgccagcaggatcaccccgcgcacgacgtattgtgagaatggcgagatattcagcaggttcatcgcattttccacggttccgaggatcaggatcccggccaccacgtaggagatcttgccgatcccgcccttcagcgacaccccgcccagcacgcaggccgaaataacaatcagctcatagccaatcgaggtcatcggctggccgctggtcatccgcgacgccagaatgatacccgctgcggccgataccagaccggagagcacaaagataataatcttggtgcgcaccaccgggacgccggccaggcgcgccgcctcttcattgccgccaatagccagcgtattacggccaaaggtggttttgtttagtaataatccgaaaaccaccaggcaggcgacggtcagccagatcggcgccggcagaccaaaccagttggcgtagccgagggtgaagaaacgttcatcttcgatccccaccgctttgccgtcggagataatataggccaggccgcggacaatctgcatggtggccagcgtggtgatcagcgcgttgatcttaaggcgcgcaatgacaaagccgttaaccaggccactaagcgcccccagcaacaggcctgcggcgatccccagccacaggctttcgctgagattaatcaccaccgcggtggtgaccccggcgcaggcgataaccgacgccaccgacaggtcaaaatcgccggaggccaggcaaaacagcatgccgcaggccaccatcccggacatcgagatcgccagccccagccctttcatattgacgaatgaagcaaagttgggcacaaaaatcacacagccgataaacagcaccgcaaacaccaccagcatgccaaactgatcccagatgcgggcaaagctaaaggttgagcgggtagccccggacgtagtcactgatgacatcatttactccttactcaggcgacagcctggctcactgttggcatcgcaaggcttaacgcctgctgttcattggcttcttcatgcagcagttcgccagcgatttgtccttcgcgcatcaccacgatgcggtcagcgacgcccagcacttccggcaggtcgctggaggcaaacaccacggcgacaccggaggcggcgaggccatagatcacattgtaaatttcatgtttggcgccgacgtcgatgccgcgggttggctcatcaagcaggatcaccttcatctcttccgacagccagcggccaaggatcgctttctgctggttgccgcccgacaggttcataatcagctgttccgggcccggcgttttaatattcagcgactggatatgttgatcggcgttgtccgcctcccaggcgttgttgatcaggcagccagcgtgaatatgcttgcgccgggcgctgatattgatgttatcgcgcacggaatgcaccggaataatcccctccgctttacgatcctccgggcacagcatcatcccggcctggatggcctgggccggtttgcgaatggagacgggctggccatcgatatacacctgaccgccggttatctgcgtgccgccaaacaggcctttcattagttcgctgcgcccggcacccaccagtccgaacaaaccgacaatttcaccgctgcgcaccgagagactaaccggcgtgcgcacgcccggcgctttgacctcctccaggcgcagccgctcctcgccataggggcgaggcttccagccataaatatcgcccagattgcggcctaccattgcctggaccagggcgtcgtggctgacgctcggcatatcgtcaaaggtgcaaacgtagcggccatctttaaagacggtgatggcatcgctgagggcaaaaatctcttccatccggtgtgaaacatagatgatgacccttccctcctcccgcaactcgcggatgacgcgaaacaggttgtcgatctctctggcggagagcgagctggtcggctcatcgaacgcgataatcttggcgttacgcgccagcgctttggcaatctccaccatctgccattgaccaatggagagatatttcagcggcgtctccgggtcgatatccagacccagatgctccagctgcaggcgggcctcatagttgagcagcgagcgattgacgatgccgcctctgtgcggcagctgaccgagatagatattttcggcgacggtcatctccgggatcagatgcagctcctggtagatgattgccacgccggcattcagcgcctccatggtattggcgaatgccatctgctggccgccgatctgcagatggcccgcggtcgggatatagttgccgctgagaattttcaacagcgtcgatttgcctgcgccattttcgcccatcagcgcgtggatctgtcctgggtagcagtcaaaactgatatcggacaaggcctttacgccagggaacgtcatggtgatgccgcgaaatgagagataaggggtagactgttgcataacgactccgctcttctgcactcagcccccgcgccgcggcgggggccagtttaatcaggctgttacagcccttttttcgccagctcttctttgaagttatcgcgggtaatcagcaccacatcggtcaccgccgtgaacttcggcggctcgacgcccttggtgacccagttgtatagcatttcgctggttttgtagccgtggatatccgggcttggcagcagagaaccatagaagccggtcggctgcgccttcgacagttcgttgacggcatccacgccgttgatgccgatgccaatcacatcgggagctttaaagccctgaccttcggtcgcgcgcacgccgccgaggacggtgttgtcgttcatcccgacgatcagccagtgtttaacctgcggatgttggaccagcatcgagttaccggcgtcgaacgctcccgggatatcgttggattttgtcggcacgcggtagatttgcgcgtccgggaagccggccgccttcagggcatcgatggagccggtggtgcgacggcgcgcggtatccagctcatcggcggtgatcgccattacggcggtgtctttgacatcccagccgcgcttttgcatctctttatagagttcctgcccctgacgggcgccaatttcgctcgccgccatcatcaccagcggtacgctctccatcggtttgcccttcgcattgacgaactggtcatcgacggtaatcaccttcatgtcatagccacgcgctttggcgacaatcgccgacccgagtttgggatcgggggtacaaatgacaaagcccttcgcgccgctggccgccaggctgtcaatggcattcagagttttctccccatccggaaccgcaattttaataacgtcaaagcctaaatcttttcctgctttatcagcaaatttccactcagtctgaaaccatggctcttccggctgtttcaccagaaaacctagtttaagattttccgccatagctgattgtgacataaccgcagcgagaccaatggccgccagcgctttagtaaatttgtgcatggtaaactccagctttaattcgctttcatgtagggaaaaatcggaattaacaatttaatcgtcatcaaaacaaggcattagaaaaatcgcattccccactgccgttgttagagtagtaatacccggaaattatttctccatacgagagcattatcacatcgcggaattacagtaattgcgtacatacatttagcaaaaaatgacataaaaaatgacacaattgtcatacaattttaccggggcatagcaggatcatctataccatcagcaggcttatccttgtgttgtcagaggatgtttaacggtgggttacagcactgttatcatcagcgattgacggcgttgctgcgggcgatcgcctgtgcgccactcaaatggcaacccacctcgcaccgctgagccacatggcccgcttaatatcgcgaaaaaacggatctttggcgtaatttattccgaatagaaaaaatatattcctcttgataaaagcgcctgcaacaaaaaataaaaataatgatcatcaacctgaaacattactaatgaaataacttattccgttctcttctacgacgaatctcgtagtcaaatacttatatcttataaccaatctgaaaccagcgagcccctgccaacggcgcacaatctcagccctggtagtttgcacaaataatggtgtaacaaaacgtaaattaccgcgcttgagagttttcttaatttcgttgagcgagtattcttaaatcgtcggcaaatggaaaaaatacccgactcatacggaatgtgtagagttttattattctgcaacagtgccgcgtgtcactattttatcttgtagttatccgcaggatccgctgacgcgcaccagtaaccccttcccggttaataaggatattttttatggcagttccaggaatggcacaaaagctaaacacccaaatgaatcttgagtttcacgcctctaacgtttacctgaacttaagcgagtggtgcgcccggcatcgcttcgacggcgccgcgacgtttctgcgcacccgcgcgcaaagcagcatcaccctcaccatgcgcgtatttgactacctgaaaaaagccggcagctggccgatcgtcaatcccgaccacgcctgtaaccctgagtgcacctcgctggaagatctgtttacccaaaccctgagcgattaccaacagcgcagtcgtctgctgagcggtctcgctcaggaagccaaagcgcaaagcgatgacagcacctggcggtttctcacgctgttggcggaagagcagcagcaggatggcctgctattgcaaagcgtgcttgaggaaattcgtaatgccgataaagccggtctcgggatggagcagaccgatcggcgtctgatggctatcgttggagaagcgcagaaagcgcattaatcaagcctttatcgctctgccagggggagcgcgtctgcgctgccccgcccggtttattaatccattacgtctattttttctcccctattattcctttcaagaataaaaaagttttaactcgatcccattccctcatcaccgttaccccataagggggattagtgagcgcggtcactttttgacgaaccataaagaaatataaaaacagtgtttcaaaaatataaaacacgaggtttattttttatggctagatacacggcttcagcctctgaagggctgcagggaagaccgatcttgttacgccatcagttagcctacggcggcggaaatctgttagggagcggcgcactggcgataagcggcgcatggctactctatttttatacgaccttttgcggcctgacgctgatcgaggcctcatttatcttctccgtcgccagcatcattgacgctatcagcaacccgctgatgggctatctgacggataattttggcaaaacgcgcctgggcaagcgcttcggccgccggcgtttctttctgctaattggtattccgctgatgatgttctacccgctgctgtgggtggaaggcctgagtttctggtactaccttagcacctatgtggtgtttgagatcatctacacctctatcatggtgccttatgaaacgctggcgacagagatgaccgatgatttctcactgcgttcaaaactgaccggctataaagctatctttggtaagctggccaacttcctcgcggcgtttattcccggccagttcattttgctgtatggcaaagattctgccacccctttcttcctcaccggtctgacctatggcgcgatcctgatcgtcgctatttcctgcctgtggttgtgcagctgggagcgtgagcgcggggaagaggtggaaaccagcgcgaaaaaaggactactgagcaccctgctgtcgctggcgaaagatatgcgttcgactttttatctacgcgtattccgcaaacatcttggtatgtacctgtgcggctttggcgcggaatggctgtttgcctccatcttcacctatttcgtgatcttcgttctacaacacgatccagcgatggtggccgggctgaacagcctgaactcgattctgcagctgatctctacggcgctgtttatcggcctgtgcgtgaaaaagggcttcagcaaaccctatatcctggcgctggggatcgtgattttcgcggttctgctgtatacctcgctgtggtttttccatctaccgtccggcctggcgacagtgctgatgttcggcattaccgtgctgttcggcctgggtaccggcggggtttactatataccctggaccgtttacaccttcctggccgatgtcgatgagatctacaccggacgccggcgggaagggatctatgccggcgccatgaccttctcaggaaaaattcttcgctcgattgtggtgttctcgatgggggcgatcctgagcttctacggtttccagtcaaaagcgcacagccaaccggaaagcgcggtgactgctatcgcagtggtattctgcgtcggggtgatcgcattagccctggccgccatcgtcttcagcaagcagatgaagctggaccggaaggcccatctggtggtgctgcaggaagtcgcgcggataaaagcgggcggcaaaattagcgatattgcgccggacgtgcgggttatcgtggaggatctggtcggccatcgctacgaagagtgctggggcaacagcaaattgttcaaagatgctgcccctgcgcctgcgcagaccgtcgtttcccattaaagaagaaggccccgccggtatccggcgaggcctggtattaatgcgtttcttcctgtggagtaaacttcagctcaatcaacgcgatcgctttttgcaccgcgcgaagggtcaccggatcggcagaggccggatggctggcgaagtcgatagctttcagctgagtggtcattttttcacgcacttccaccggcgcaatgacgtcaatgacatcgaggatctgtttgataaccagctggcaggcaaccacatcggaaaccagctcgtcgtgttcggtaagatgttgagacattaattactccttttttcaggagcgtaatagtaccctaaatcgttaacgataataaaacctgccgtcgcaggtttttttatctaccctactggctggcgggtcgtctcctgccgctttgcacaggatcacactcttgatggcagtgacaacatgaataccgcgatctcttcccgcgatgaacgtgctttttcagcgccggcgctgctggtggccggtgccttttttatggagtttctcgacgggacggtgatcgccaccgccctgcccgatatggcgagggattttggcgtcaccgcggtcgaactgaatatcggcatcagcgcctatctgattacccttgcggtcctgatcccggccagcggctggatcgccgatcgcttcggcgcccgggctatttttactctcgccctggcgatctttacccttgcctcggtcttctgcggcctctccaccgaggtgcatatctttgtcgccatgcgtatccttcagggagtcggcggcgcgctgatggtccccgttggtcgccttgcggtgctacgcaccacgccgaaacaccagctgatcaaggccatcgccaccctgacctggccggcgctggtggcccccattatcggcccgcctttgggcggctttataacccgctacgccagctggcactggatcttctttatcaatgtcccgctgggccttgccgccatcatcctttcgctgcgcattatccctgatattcgcgaaacggaacggcgctccttcgatctcagcggatttatcactacctcggtcgcgatggtcagtctggtgaccgcgatggagcggctcggcgatcgccagccgcagatctggccgacgctggctctcgccgcgcttggcttcggctgtctgttatattccattcgtcatttccgccgggcggcggcgcctatggttcgtctcgacgccctgcaggtgccgacgttccgggtgacaatgtacggcggctcgttgttccgggcctccatcagcgcggtgccttttctgctccccctactgttccaggtgggattcggtatggatccttttcattccggcctgctggtgctggcggtgtttgtcggtaatttaaccattaaacccgccaccacaccgctcattcgctggctgggctttcgtcggctactgctgatcaatggtgcgttgaacgtctgttcgctgctggcttgcgcgctgcttacgccgcagacgccggtctgggccatcatgctgatcctttatctcggcggggtgtttcgctcaatccagtttaccggtgtaagcacgctggcctttgccgatgtccccgccgcgcagatgagtgatgccaatacgctgttcagtaccgcgtcgcagctggcggtagggctggggatcacgctcggggcgattggcattcgcctgggcgagcaggtcggcgactggctgcatcttactgaactaccggggatcagcttccgcctgtcgtttgtgtttatcgccttgatctgtctggtagggatgatcgacagcctgcatctggccaaaacggccggcagcagcgtgtcggagaagaagaaatagaagaaaaaataaacgacggaagggccagcggcgctggccctgatgacggttaagcgacgatctggcgaacaaagtcttcgattgctttatcctggcagttttcgaagaagcactgctggaagcgtgggccggagactgcggttttcaccagctgcggatcgatggcgcgcagggtatcgaggtagttctcttttactactgctgctttgacctggttgaggatcccggcattgcgcacctgcggttctttgcgctccggcggatagccttcgccgttgcggccggtaaaggctttttcaaagataaaccgcacattcagttcggcgccccagccgaagcctttggcaaacggcagcgacagcgcattaccgttgttgatctgggcaaacaggaacgcatccgccggatcgatacagtagccgcagaccacgcccggatggatgttcagcgacatcagcgccccctgaccggtaccgcagccggtgaccacgaagtcaactgctttcgaattcagcagaatactggccatgatcccaagatggatgtaggtcagatgatgatcgttctcatcgctcatgccgacgttatagaccgggaatcctttttcgtcggcaaccgcgttaagctccttgaggatgatggcgtttttgttcgcctggctgttctccatcatcagtgcaatcttcatggtttactctcctgaatgttgtgcgggcctgcccgcagaatgtcattggcgttgactgcactctactaccttgaaaacaaactttcaaattttatgaaaagttgttttaaaatttacgcagtgcttcacactttcgcaggctccctttgtctgttgacctcagccctctgcatgctggcgtatccgcttcgtcctcccttaccacccgccggcgacaaaaccctgaccgcccaggcaataatgaataataaattaaaagcattctcatttattattaaactgccaatgcgtgttattcccattagcattttaaataaaacatttttaaatttactttttgcaaataattaaataacaaattatagtggcagccaataacatctattatttaattccaggagtgcaacgatgctgaaaacggacatgattgacaaactcaatgaacagatgaatcttgaactctattcttctcttctttatcagcagatgagcgcctggtgcagttaccacagttttgaaggcgccgcggccttcctgcgtcgccatgctcaggaagagatgacccatatgcagcgcctgttcgactatctaaccgacaccggcagcctgccgcggatcaacgctatcgcctccccgtttgccgaatatgcctcactcgacgagctgttccgccagacctacgagcatgagcagctgatcacgcaaaaaataaatgaactggcgcacgcggccatgaccagccaggattatccgacctttaatttcctgcagtggtatgttgctgaacagcatgaagaagagaaattatttaaatcggtgatcgataaactgaccctcgctgggaaaagcggcgaaggtctgtactttatcgataaagagctggctaccctcgacgcgcagaattaatcccccgcgccgcgacagtccgtgtcgcggccctcttaatgtcggcagatcttattttctgcggtagtaagaccttcctctctggcaataaatttgccttttttctctaaaaacgccaccaactgtgcggcgcttagattctctgctgaacaggtgtgaaaccgcgcctcttcgccaaagcggcggcgaatggcggcctccagcgaggcgaccgtccaggactcacccgaggcgagcatcatctgtaaaacttcatgaccatgaatagaagacataacccctcctgcaaaaaccgccagcttaggccagaccgtcaacccgcgccttgcgccagcgcaggctttcgccctcttattatgtaaacatttcattacacaacttgtaatcccgatttgacgaaagccgtaatatcccctactctgcgcggcataatttattgttatttgctgtagggatagcgaaaagcgtgaaaaaccgcactctgggcagtattttaatcgttgctggcaccaccatcggtgcaggaatgttggcaatgccattggccgccgcaggcgtcggctttaccgtcacgttgggtttacttttcaccctgtgggcattgatgtgctataccgcccttttgctgctggaagtctaccagcatgtccctgccgatatggggctcggttctctggcggcgcgctatctgggccgttatgggcagtgggttaccggattctgcatgctgttcctgctgtacgccctcacggcagcctatatcagtggcgccggtgaattactcgcttccagcctcaaccagtggctggactggcagctaccgccggccgcaggcgtactgatcttcaccctcctcggcggggcggtagtgtgcattggcaccgcgctggtggatctgttcaatcgcttcctgtttagcgccaaaatcgtcttcctggtgattatgctggccctgctgatgccgcacattcatcaggtgaacctgctgacgctgccggttgagcaaggcctggccctgtcggccattccggtgattttcacctcctttggttttcacggcagcgtcccgagcatcgtcagctatctggggggggatattcgcaaattgcgccgggtatttatcatcggcagctttattccgctggtggcctatattttctggcagctggcgacgctgggcagtatcgacgcctcggcctttaccgccctgctggcaaataacgctggtctgaacggcctgctggaggcgatccgcgaagtggtggcgtcaccgcatgtggagctggccgttcacctgtttgccgaccttgcgctggcgacgtcattcctcggcgtctcgctcggcctgtttgattatctggcggatatgtttcagcgtaaaaacagcgtcggcgggcgtctgcagagcgggataatcaccttcctgccgccgctggcgttcgccctgttctatccccgcggtttcgtcatggccctcggctacgccggggtggcattagccgtgctggcgctgataatgccggccctgctggtcatgaagagtcgccgagagcatccgcaggctacctggcgggtcgccggcggcgcaccgacgctatggctggttctgctgtgcgggatcggcatcgtggctattcagttcagcatcgctgccgggttgttgcccgcggtgggataaaaaaggggcctgctggccccttgttcatttcgctaagcaacactgcttatactttttaccgctgccgcatgggcagggatcgttgcgtccgactttcgcttcatttcttattggctgcggggcctccaccggctgcggattcgctatccagtactggtaaagcgccagcgccgccggcgtgatacgctcgatgctggcgataaattcatccgccgtcagattatccagcgcgctaaactgttcttcgctgccgtggagcgcgatagcgtccagctccggctggagttcagcgggcaacgtcgaccagtcgctcagcgccacgccgcgcagatagccaaagcaccactcctcaactatggtcagctcctgaccttccgcttcgcgggtgccgaacagcggttcgaactgatcgggataagactccagccgttcggcgatatcgctcatatgctgcagcgtcagattgacaaagcgatcgcgctcgcgatcgttggcccagcgcgggacattatccgccccgccccaaatcgccagcagccactgagcgggttcgatgtcggtcggcgcagagaggatcgccgtcagcaggccatccagttcagagacatccagaatggcgccttcggcggcgtatttcgccagagtgtcatccagccattccagttcgttttcgttcaaaggtccggtattcattcacaggctcgcatggtaaaaatcgggcctacagtagccgaattgccgacagaaagccacccggcgatacctattgcgccggtgtcaacgatacgcgatcaggccaggccgcgcagcgccgacgccacctcacgacaggcctcctcccctaacgaaagcaaaggacggggaagcgagtctggatcgcagagtccgagcatcgctgcggcgctggctatcactcgcaggctaccaccatagcgatcaaagcatcgccataggggggccagctgctcattcagtgccgcagtctgcgccacatcgccgctacgtatcgctcttaccagcgccagtgagcagcggggaaagagtccgccgcagaccgaataccaggcttcgcagccggcctgcaacccggcagtggcccacgcatcgccgctaacgccaagcgtaacgcgagagggaagatgctgacgcagggccgctacacgttcgctcgcctgtggcgcgggcaggccgggaattttaatcgaggcaatggccggcaaggcgcgatgcgcccctgcagctcatccgccagcattacgtgggtagtgcggggattgtcatacaggcaaaccggcaccgagacatgccggcaaacttcttcgtaaaaggcaaagatctcctccgcggaaagcggctgataggacatcatcggcagtaataacgcatccgcccctgcctcctgagcatcctccaccaggcgtagcacctcgttagtcgcaatggcgccgacgccgaccatcatcgggatcgaccccgcatgcgccttcgccacctgcaccactcgtctgcgctgctcacggctgagataagcgtagctgccggttgaacctaagatgcccagagagtcgactccggcatcggtaagacgggccagaatacgaataaacgctttttcatcaaaattttgctgatgcaaaggtgtcaaaggaaatgcgcaaagtccactgaacatgctgcctccggcaggctgggctgagagttcgtttgatagtagcaaggcgcgatcgttttgtcctgggacaaatgagaaattgactgtaaggcaagagttaaccgaaaaacgccgtggcgtcaggctggcgggaatggtatcagaaagcgaaagtacagaaacaaaaaaaccacccgtaggtggtttcacgacactgcttattgctttgattattctgtatttcccaatggtacccggagcgggacttgaacccgcacagcgcgaacgccgagggattttaaatcccttgtgtctaccgattccaccatccgggctcgggatataaagtggaggcgcgttccggagtcgaaccggactagacggatttgcaatccgctacataaccgctttgctaacgcgcctttaatactgaagcacccgcaactgccgatgctgttaatctggagcgggaaacgagactcgaactcgcgaccccgaccttggcaaggtcgtgctctaccaactgagctattcccgcatcatcaagttatttgctaatcacttgattttgttatcgtctggaagactgtgccgccgttcgatgcgttgcattctacttatctctcgcggtgagtcaacggtatttttcgcaactttgtatcgtttgctgaaaataacggcgaaacgatcactgatcaagcaaatcgccgcgcgccgcgttcaaatactgcagcatcgaccacagcgtcagcaccgccgccacgaggaaaagcgcgatcccggcccactccacccacggataaggacgccacagcatccataccagggcggtcatctgggcggtcgttttcactttgccaatccatgagaccgccacgctgctgcgtttccccagctccgccatccactcacgcagcgcggagataatgatctcacgggcaatcatggtcgccgccggtagcgtgacccaccaggtgtgatagtgttcggcaaccagcaccatggcgatagccaccatgactttatcggcaaccgggtcgaggaaggcgccaaaacgggtgctctgattccagcgacgagcgaggaaaccatcaaaccagtcggttaccgcggcaacaaagaagatcagcgcgcaggcaaacggcgcccagctaaagggcagataaaacgccagcacaaaaaacgggatcaggatgacgcgaaacagagtaagcaacgtagggatattaaattgcatagtgacgggtaactatctgttgtaagtaaaaattagccctatgttgctacagagcccctaatgtttcaacgagtagaagatcttttctgccagagcgtgagagatgcccggcactttagcaatttcttcgacgctggcctgctgtagcccctgcagcccacccatatacttcagcagcatctgacgacgcttcggccccaccccctcgatagtctcaagcgagctggtgctcttcactttcgcccgttttttgcgatgcccggagatcgcatgatcgtgcgattcatcgcgaatatgctggatcacatgcagggccggcgaatccggcggcaggctaaacccttccccttccggctcaaagaataacgtttccagacccgcttttcgatcgctacctttcgccacgcccagcagcagcggatgatgtttatcccaggggacgtccagttcagcaaacacggctttcgcctgggccagctgtcccttgccgccgtctatcaggatcacatccgggatcttgttgtcatcaatcgctttaccatagcgacggcgcaggacctgattcatcgccgcatagtcatcgccaggggtaatgccggtgatgttgtagcgccgatactccgcgcgcagtgggccattgctgtcaaacaccacacaggatgctacggtctgttcgcccatggtgtggctgatgtcaaaacactccattcgcttgacggccggcagctccagtacgctggccagcgcctgcaaacgctgatgaatggtcgattgctgagacaatttggtcgttaacgctgtcgcggcgttggtccgcgccagcttaagataacgcgctctgtcgccgcgcggcttagtctgcacattgattcgacgacccgccagctccgacagcgagtcggccagcagcgtcttatccccaaggttaaagtcgagcaaaatctcccccggcagcgtgcgcatttggctgccctgcaggtagaactggccgacaaaggtctccacgacctctcccagctcggtgccgcccggcactttcgggaagtagcttcggctgcccagcactttgccctgacggataaacagcacatgcacgcaggccatgccggcatcgaaggcgacgccgatcacgtcgaggtcgtcaccggtgttggagacaaactgtttctccgtcacgcggcggacggcctgaatctggtcgcggatgcgcgcggcctcttcgaactccaggttctggctcgccttctccatccgcgcgatgagctgggtcagcacctggtcatccttgccggcgagaaacagccgcacatactctacctgctgagcatactcttcttcgctgaccagcccggccacgcacggccccaggcagcgaccaatctgatactgcagacaggggcgggagcgattgcggtagacgctgttttcacactgacggatgggaaagattttctgcagcagcgccagggtctcgcgcacggcatagccgttgggaaaaggaccaaaatattcgcccttcgcatgtttggcgccgcgatgcatcgccagacgcggatgagtatcgccgctgagaaaaataaaaggatacgatttatcgtcgcgtaacagcacgttgtaacgtggctggtacagcttaatatagttgtgctcaagcagcagcgcttccgtctcggtgtgggtgacggtcacgtcgatttgcgcgatcagcgctaccagcgcttccgttttacgcgacgcaaggttgctgcggaagtagctactgagccgctttttcagatctttggctttgccaacatagatgacggttccgccagcatcatacatccgatacacaccgggctggctggtcaccgttttcaggaaagcttttgcgtcaaaaacatcactcactggcttgctaacgactccgcattacacaggccatggcgaattgccaggtgggtcagctcgacatcgccatgaatgtttaatttactgaacatccgatagcggtagctgttaaccgttttaggactcagatttagctgctctgagatctcattcaccttctgacctttggtgatcatcagcataatctgcaattcgcgttcagacaaactggcaaacggcgattctgtcttttcgggttcaatctgacttaacgccatttgctgggcaatatcggaggcaatatagcgctgcccggacgcgacgcagcggatggcattcaccacttcctgcggcgcggcgcctttactgagatagcctgccgcgcccgcctgcatgaccttggcaggtaaaggattctcggtatgcacggtcaacatgatcactttggtgcccgccacggagcgcgcgattttgcgcgtcgcttcaagaccaccgatcccaggcatgttcatgtccatcaggacgacatctgcggaattagcccggcaccacttgacggcgtcctcgccgcagcaggcttcgccagcgactttaatcccttttatatcttccagaatgcgtcgtatccctgcgcgcaccagttcgtggtcatcaacaagaagaacgttgatcaaaggaataatctccagaatgagggataacgctactgatactttatctcccacatattaccgggttttattgctattttaaaaggcaaaaaaatgccctcgcctcgatttggctctcatttatggcaatgtctgtgcacactaagtggaaagtcattgagaacagtcagttgcccggctcttattttttaacaatactcatacagaaggcacaaaaaacacaacagattacgtagcgcataaatacgaagcaaaatatgtaacaattattaacgagctaaatagatgggggaaattattggcttgccgacggctattacgtattatccgaagcatcaaaacattcacagctcagatgagagaacagaaattaagcacaccttttttttctgtcgcttgtggtatactgcgcggccttcacattgactagagcgcaatagcgcagcgagtaaacgaggatatcgatgagcacaccagatttttccactgcagaaaataagcaggaactggcgcaggaagtctcctgcctgaaagcgatgattacgctgatgctgcaggcgatgggccaggcggatgcggggcgcgtgattattaaaatggaaaagcagatttcacagatggaagatgaggctcaggccgccgtattctccagcaccgttaagcagattaaacaagcctatcggcagtaatcctgtgccggctgaaagtatcactgacagccggtatcacgtctgacacgcagaacggcaggcgcattcagattagcccagtcgccacggcgtagcaggcaatttgcgttttattcggcgcattaaatttccgctgcatattcttctgatggaaattcaccgtattttccgaaatcgagagaatcatcgccacctccgccgaagtctttccttccgccgtccatttgaggatttccagttcgcggcggctgaacttcatctccggcggcatcaccatctcatcttccagacgcagcagcgtcagcaagcttagttcagtcagcgttcgcagacgcagctcaagctcatcttcagggtaaccgcccggcagacgattgttcgcggagacagagagaaatccctgagcatggtttggcaacgtcaggcactgcgtcacgcccttttgcagaccatggtcacgcgccccgtcccacagtgccggcgcatcacgaaacaggctgtcgttccatggcagatggccacgcataaaattctccggccgtaacacaggatctatcgcgaaataattttctgcctgatagtgcgacatccatgcgcgggggtaagtcgactggaacgtaacgcgggggcgggtgaaaggcaccgggtggcgcacacaaagcgtgtagtaatcatattccagcgcttcggtttcacgttgcaggagattataaacctcctcgccggtggccatggactgaaattggtgcagcatatcccgccgccagctgaaaaaatcattgtccctcatagctgtgcaaataactcctgattgataatcattattataaatacagaaaactaacacataaatcttatttatatgtataaaatatcgtagctgtcgcatttattagtctgaaggcttgccattttcccgctcgccgcacagaaacatagcgcttttctcccatcatgttctacaccctgccaagggcgatgggaagcggtgtatacggccgtgggagtcaatagcgcaaagacatgtcgcgggggagttaccccgccgcgagagtgggctaaacgcggcggctcccgcgaagctgagccgccgcgctagcacaagctttactgcatcaggaatttttcaaggaactgacgggtacgcggctgctggggcgaagcgaacaacgcttttgcctcgccttgttcgacaatgcgtccctgatccataaatatcgcccgatcggctacgtcgcgggcgaaactcatttcatgggtcacgatcaccatggtgcgtttttcctgcgccagctgacggatggtgttgagcacctcccccaccaactcaggatcgagggccgaggtgggttcatcaaacaggatcacgtccggacgcatagccagcgcgcgggcaatagccactcgctgctgctgcccgccggagagacggcgcggatagctattctcttttccgctgagccccaccttcgccagcagttcgcgcgcccgcgccatggactcctgcttatcttcaccttttacgatgaccggcccttcaataatgttctccagcaccgtacggtggggaaacagattaaagttctggaagacaaagccgacgtgctggcgcagctggcgaatgagccctttctgcggcccgaggctgcgaccggcgtcgatcgtcacatcgccgacgcggatagtgccgctctccggttgctccagcaggttgatgctacgcagcagggtggttttgcccgagccgctggggccgatgatcgccaccacttcccctttctgtacctccaggtcgataccatggagcaccgtctggccatggaatttttttaccaggcttttcacttctatcgcactcatttcggatcacgctcctggcggttcagctggttttcaaaataattctgcagcgaggagagcactgtcgccattacccagtagatcagggaagccgccagatacatagtgaagacctccagggttcgcgaggtgattagctgcgcctgacggaacagctccggcacctggatcgttgccgccagcgaggtatcttttaccaggctgataaaactgttcgacagcggcggcaaagcgacccgcgccgcctggggtaaaatggcccgacgcatcgtctgccagggcgtcataccgatactggccgccgcttcccattgccctttatcaatcgaggcgatggccgcgcgcagcgtttccgccgcataggccgcagtattcaacgacaggccgatcatcgccgccgggatcgggtcaagctcaatgccgaactgcggcaagccgtagtagatcataaacagctgggcgataagcggcgtgccgcggaaaatggagatatacatgcgcgccagccattttaccggccagactggcgacatgcgcatcagcgccaggataaagcccagcaccaggccgaaaaacatcccgccaatgctcagctgcagcgtaaagacggcccctttcagcagaaaaggggcggaatcaatgaccagttggatactttcttgcatgctgtcgtttctgtattagaggtgaggatgataggcaaacagcgccggcgctccgccggtatggacgaacagtatcggcccttcatccttaaagcgcttctgcgtgatgccgtcgataagcccggccatcgctttgccggtatagaccgggtcgagcaaaataccttccagctgcgccagcagcttcacagcggccatcccatcttcgtttggcgtaccgtatcctggggcaaagtagtcatcccacagtataatttcagccttcgcctgtagctcgagactgttggccacggcctgctgcagcgccaccactttcggcaactggtcagcgaccgagcgcgacacggtcaccccaatcagttccgcctgcggcatcagctgttcaaggccgaccgccaatccggcatgggtgccggcgctgccggaggcgaccacgactgacgagatcgccaccgcgtcttcgcactgctggctgatttccagtgcgctttccacatagcctaacgcgccgagggcattggagccgccgaccggaataacatacggacgatacccctgcgcctcaatgcgggtcgccagctcatcgagctgggcggcgggatcggtcagggcatcacacatctcaacctgggtgttaaagagatccagcagcagacggttgccattgctcagatagttctccgcccgggtgccgatgggattttccagtagcgccacgcaatgcagtcccagtttcgcagcgactgccgccgtctgacgcacatggttagactggatcgcgccggcggtgattaaggtatccgcgccctcgcgcagcgcatcggcggcgagaaactccagcttacgcagtttgttgccccccatcgccagcggcgtcgtatcatcacgtttaataaaaatttcgcgcccaaggtgatcggacagacgcgggagatactccagcggcgtcggcgcgccgatcaattccaggcgcggaaagcgggttaagttttgcagtgacatggcccctcctgactcagttatgcttcattatgcacacagttacgcgctaaataaaaaaaggcgcttccaggagcgccttttttcaccgctgtccgttatttcgtcacgtcagcgccaaaccatttctcggacagcgccttcaggctgccatctttctgcatgtctgcaatcgcgccatctaccgctttcagcaggtcgtcgttgcctttacgcagcgcaacgccagcttcctgacgagagaaggcttcgccggttaccgccagcgtattgttggttttcttcaccagatccaacgccgccagacggtctaccagaatggcgtcaatacggcctacacgcagatcctggtatttggtgggatcgtcatcataggtacggacgtccacgccctgcacattctgacgcagccactcttcatagttagtgcccagtccgacgcccactttcttgcctttcagatccgccgcggttttaatcacgccttcgttacccttcttcaccagcgcctgcacgccggagacggtatatggggtagagaaatcgtatttcttcttacgttcgtcagagatagtgacctggttaatcaccacgtcgatacgcttggagtccagcgaggccagcataccgtcccacttggtcggtttgagatcggccttcacgccaagatgtttcgccagttcgttagcgaattccacttcaaacccggtcagcttgccgtcatccccctggaaactaaagggagggtaggtgccttcgaggcccacgcgtagggtgccgcgctctttaatctgattgagcaggttttccgccgcaaaagttttcacgctgacgccagccatcaaaacaacggccatcgcgcccatcatcgcctgacgacccagaagtgctaatttcatagataccccgaaggttaggattttcctgtagtgtaaggcgcttaatgccctgacaccaacatcgttacgctacatcttatgcaaatttattatatatgatccgctttagggtatagcgaaaatcagggctttcctcaccctttttgctggatatctcccatactgcaaaggtcagcctgttgacgtctggagcatggaagatgaaaaaccccaccttattgcaatgttttcactggtactaccccaccggcggcgagctgtggcctgaggtcgaagcgctggcgcccagcctgaatgaaatcggcatcaatatggtctggttgccacccgcctacaaaggcgcctcgggcggttactccgtcggctatgatacctacgatctctttgacctcggcgagtttgatcaaaaagggtctgtcgccaccaaatatggcgacaaagcgcagttgctggcggcgatcaacgccctgaaggagcacaatatcgccgtgctgctggatgtggtggttaaccataaaatgggcgctgatgaaaaagaggctctgcgcgttcagcgcgtcgatgagcaggatcgtacgcaaattgacgaggagatcattgagtgcgaggcatggacgcgctacaccttcccggtgcgcgccggacagtattcgcagtttgtctgggactacaaatgttttagcggcattgaccacatcgagaacccgacggaagacggtgtgtttaaaatcgtcaacgattacaccggcgaaggctggaatgaacaggtcgatgatgagctcggcaactttgactatctgatgggcgccaatatcgatttccgcaatcatgcagtgaccgaggagatcaaatactgggcgcgctgggtaatggagcagaccggctgcgacggttttcgtcttgacgcggtcaagcatatccccgcctggttttataaagcgtggatcgagcatgttcaggaggtggccccgcagccgctgtttattgtagcggaatactggtcccatgaagtggagaagctccagcagtatatcgacctggtcgagggcaaaacgatgctgtttgatgccccactgcagatgaaatttcatgaagcgtcgcgccagggccgcgattatgacatgagccagattttcagcgggacgctggtggaagccgaccctttccatgccgtcactctggtcaccaatcatgatacgcagccgctgcaggccctcgaggcgccggttgaaccctggttcaagcccctcgcctatgcgctgatcctgctgcgggagaatggcgtgccctcggtcttttatgccgatctcttcggcgcttcctatgaggataccggcggcgacggagagacctatgccattgagatgcccgttatcgaacaactccacgagctgatcgacgcccgtcagcgttttgcccatggcgtgcaaaccctttggttcgatcatcctaactgcatcgcctttagtcgtagcggtactgacgacgatccaggctgcgtggtgatcatgtccaatggcgatgagggcgaaaagacgctgacgctgggcgaaaactatggcaacaaacgctggcgggattttctcggtaaccgggaagagattgtcgaaaccgatggcgaaggctgcgcgacctttacatgtaacggggggagcgtgagcgtgtgggtgttagaggaggtattgtagtcctctgacgccgggcgggccagctatggcccgccaaaatctcagcgcgtggaggccggcgcgctgacgggccccgtcgctcgcgctttggcccacgccttctcgcactccggagtgagacgttcaacacgggacaacgtcatccgatcgtaggagatcgtgttgccctcgcgctcgacaggatagatgtccagggaagcggtcacgttgtagatctcactgtcacgattcatcagtttccccggctgcgcaatcacgcgctgccactggcggcagtcgaaggtgtccccttctttggtgacaatcaggctggcaatggcgtcaggactcatcatcgcgctctgcggccctttcgtttgccagaaacctgcaaggccagccggcgccggcgctttaacgacgtcctcataacgatcaacctgtacgcaaccggccagcgccaccaccatgccagcaaaaaataactttttcatcattcatcccacaagccgataaaaaagtattgtggcattaaagcgttaagccttccacccccaccgcaaagggataagcgagcaagccagcaaccgctaacgtgggtttcatttgaagtaaggaaattctgaaagtaaaagaatactgggcgcgtaaccatagcatctatgggcactttttgtttttaattcggtcacactaccggttcttgactttactttaagagttttcctggcaaattatatgcatagatgcggaatagtttaatggagctaatgggttctttctaaacctactattattatcgcccgcaaggactgcttcgcacagccagtgcgaagtgtatatcgttacgtgttgattgaggatgggtcatgtcaacgatgattatggatttgtgcagctatacccggttgggattgacgggatatctgaccagtcggggaattaaaaaacaggaaatcgttgaggtcaacagtgctgcggatctgcagaaacactgtacgtcgtgttgcccggcggtggtgtttctgaatgaagactgtttcgtgcatgatgatgaaagtaatggcattattcgccagatcattacgcaaaacccggcgacgctgtttgttatctttatgtcgctggcgaacatccattttgaccgctatttgcgggtacggaagaatctgctaatcagttcaaaatcgataaccccaaaagaccttgatgttattctggttaattatcttaaatacaaaaacaccagtgtagggcagttaactttaccgacattgtcactgagtaaaacagaatcaaatatgctgcaaatgtggatggccgggcatggtacttcgcaaatctcaacgcaaatgaacatcaaagcgaagacggtatcgtcgcataaaggcaatattaaaaagaaaatacaaacgcataataagcaggtgatttatcatatcgttcggctgaccgaaaacatcacctccggtattcaggtaaatatgcgctgaaacaaactggcggcgctcccgccagttcagttttacgagacctctttttccacgaaaatcccatccgggtggcctatttcattaaaaaaccagatccccagaggatagtcttccagtgaaaccagatacatcgttccttcactaaacgactcaatcgccagcactacccccgatcgacgtgggccaccgtcggtcttcaccgtgacacgatcgttcacctgcataatcatctcctctatattttcagccagtgtagaacaaaaccacgcaactcgcagcgtcgcggcacgtgactggcgcttttttagaccgactatacttagagaggcttgagcgacgctcagcgagggggtaatgatgaagcaccaattaacaggccagaccggggacgaccttgacgtcaacgtagatgccctgctggcggcaattaatgagatcagcgaaagcgaagtccatcgcacgctggacgacccgcagcgcgccagcattgatggccgcgggtcacatacctggcgtgagctggcggaggcattcgaactcgatattcacgatttcagcgccagtgaagccaaccgttagcggcaggcgaaaaaaatcccgactcgcaggagtcgggatcaaacttgctaatgcaagaagcacttgaaaattcgttacaccgggaaatccgatgcgttgaaacattatcctcaattattttgcatgacaagagatattcatgacgcaaaatattgagaatgttggcgcttgatgacttatcgggctgcaaggctgatgtgagaaggcttagccgcaaaccggtttcattcgatagcgcgatcgcctgcgatcactttaagataattctcattttgccaatcggcatcgaaacgttttactcacgctgcgctgcgaaaacagacctggttacgcccattttgcttggccagatagagtcgcccatcggccaccgactgcagcgcttcaaactgatactccccccgctcttcgctggcgctcacccctaacgaggcgctaacccgcagcgtcacgttgttatgcaaaaagacttcccgtccctggatacgctggcgcaatcgctccgccaccgccgccgcttcctgcagggtggtattcggcatcacgatacaaaactcttctccgcccactctgcccagcagatcgccctgccgaaccgcgctggacagcgtactggccaccatcgacagcaccctgtcccccgcctgatgaccatagcgatcgttgatgtgcttaaaatgatccagatcgagttggatcaccgccagcggccgtccgctgcgctggcagtcgctggctaccgccatcgcctgttcaaacagcgccccgcgattgagcaggcgggtcaaggcatcatgccatgcctgccactccagagaggtttgcagaacgctcatgttgcggaccatgcggcggatcaccagccaggagagcaacagcatcaaggtgaagaggacccacatcagggtcagggcgatggtgatggtgccaaagttcccgcggacgccttcccgcagagtgtggatccgcagcagcacgccgtcaaaattgcgcagtttggcccagctgatatagcgcgtcagcagacgcagccctccctggttatcatggacaaacgcgcggctcagcagctcctgctcgcgcggcgacagcagggtcaggacattccccggcgcggaagaagccagcaggttcaaatggctatcataaagttggtactctccctcttgtcccccctgcatggcgctaaccaaaaacgctttgatttcactgactgagaaatccatcgccagcacgccgcgccagtaaccggcaaaatccaacggtatcgaagcggtgaccacctgctcttccagctgcgggtcatcgtcaggaaaggtttgccagataacgcctcgccccggattatttcgctgggtctggcgggtaaaccacggagcgccgagggcttgggaatagtgcgttatcacctgcgactcatcccgcagcggcagggtcgaggtaaaaaagccgctacgagagatatactgcatccgctcggcgaaatcgcgatcgtgctgcgtcagatttagcagataacccagctcgagcgtcgccattagttcatcagccgccagcggatcgtccaccagcaggatagggttgtcgccagcgacgctgcccgagatgccaaacaccggcagcgtacgccgattcggtagcgccacccgccaggcctgctgatggcgctggctcagatagcgttggctggccttacgcaatacatcgatatcgagcggctgttcgagcgccgcctgcatcccatggcgaaaaaacatcattctgtcgatgttgaactgcaacagcccatccatttcatgagcgacgttagccagattattacgctggttggccacgtaggcctcttccaggacattgatttcacgccagatcagcagcgtggagaaaaacagcactgcgataaaacaagcgttaaccacatgcgccgggcgagccaggtggtagcacttttttaacttcaaccgcagtggcttatccatctttctctcgcagtacgttgcgcaaacctcgcggcgtcagcgccccggtctctgtcgatacccggggcgttttcagggtagaacacgcggcgccgttacgctgcgtttcgccatgctactttccagcgccacgcaggctgctcaccgccttaacgcccgccagcaccaccgcgccgatgataaaacccagcaccaggttggcgacgaccggcagcgtggaggccatcacaccacccaaccccgcgctccagtgctcaatggcatgatgcagcggcgcaataccgtgaacgacaatccccccgccgacgaggaacatggccagcgtcccgacgatggacaacaccttcatcaggcggggagcgacggccaggagccctttacccagccactgcgccagcgcactacgtttttccgccagccagtaacccatgtcgtccagcttgacgatcacccccaccaggccatacaccccgatagtgaccagaatcgcaatccccgagagaataaggatctggttaagcagcggagcttccgccacgatgccgagggtaatggcgacaatttccgcggacaaaataaaatcggtgcgaatcgcgccttttactttgtcacgctcaaaggccagcggatcgcgctccgccagcgcggcgagacgctgctgccgccgttcaggatcctctttgtgtttccgcgcttccagactgtgcagtaccttctccaccccttcgaaacagagaaacgcgccgcccagcatcaacaatggcgtaatcgcccaggggatgaaggcgctgatcaacaaagccagtggcacgaggatcactttgttaacgaacgaccctttcgccactccccagaccacgggcaactcgcgattcgcccgcacgccggtaacctgttgggcattgagagacaaatcgtcgcccagcacccccgccgtttttttcgccgctaccttgcccatcacggaaatatcgtccagcagcgtggcgatatcatcaagtaatgttaaaagactacttcctgccaaaatgattttccttctcttttcatcaatgtctccctcgagtatgcgttaaaaaacggccggtgcccaaggtacaattagtcaatataaatttaacaacctgacgcaaattaaccactcgccagcacgatagttttcacgtttactatatgtcccctttctatctctgcaccgtcgtgaggaagtatgtctacccgtcagcttttaccgctcatcggggcgctgtttgcgctgtatatcatctggggctctacctatttcgctatcgccgtcggggtcgccagctggccgccgctaatgatggccggcattcgttttctcgctgccggcgtgctgttgctagggtggctactggccaccggccataagctaccggcgcgtcgtccgctgcttaacgctgcgctgatcggcgtgttgctgcttgcggttggcaacggcttcgtgacgctggctgaacatcagcacgttccgtcagggatcgcggcggtgatggtcgccaccgtaccgctgttcaccttatgcttcagccgctttttcggcatcgccacccgtaaactggagtggctgggcattgccattggccttgcgggtatcgtgatgctcaacagcggaggcaacctgaacggcaacccctggggcgcactgctgatcctgattggttccctaagctgggccttcggctcggtttacggttcgcgaatcgtactgccgaccggcatgatggcgggggcaatcgagatgctcgccgccgggatcgtcctgctggtggcctcatggctgagcgatgaaaccttaacccgcgtcccttcctggtccgggatcgccgccctggcctatctggccatctttggctcgctgatcgccattaacgcctacatgtttttaatccgcaatgtcaccccggcggttgccaccagctacgcctatgttaatccggtggtcgcggtgctcctcggtactgggttcggcggcgagagcctgtcgctcattgagtggctggcgctggcggtgattattttcgccgtagtgctggtgacgctggggaaatatctcttcccagtccgcagcgaggctactccttgtaaggcgtcgaagtagtcgtcagttcgcggatcccctgcgtatcgatctgcgcgtcgtgtccggcgccgcagatccactcttccagacgctcggtgagcgccgcatcactcagcctaaggcgcccgcgcagggcgcattcccagatgattaatacccgccagccctcttcggccagcttttgccggtcgcgggcgtcgcgcgccacgttaccagcgattttgtccagccagaatgccgtgcgggtggccggcaccttaaacagatagcagtcatggtgatgccagaaacagccgtgagtaaagataacgcaacggtagtcgggtaaagtgaaatcgggacgtcccggcagcgcgcgatcctgggcaacaaaggtgaatcccgccccggtcagcagcgccgctatccgcttttcgatcgccgtatcgcgcgtggcgatcgcccgcatatttttactgcgcgtcgctttatcgtgaacatccgccatcattatcatccgcttcgcggcgcgccaccgcctgagcgatgcgcggcgccaggagtttcgccaccgcggcgaagaccggaaccaccaccgagttgccaaactgacgataggcctgcgtatccgataccgggatgcgaaaacgcgccccctgcggggattcaaagcccatcagccgggcgcattcgcgcggcgtcaaccggcgaggccgccgctgttgattcagcggatcgtcaaaatgcttctcaccgagcggccggtcccagccgcgatcgacgagaatttcggcaccatctttatagtagcgggcagaaagcgtccgggccacgctgtggggattggcggggtcaaccaggccataaccaaagccattgccccgcgcctgatgcttgcgggcataacgataaagatatttccacagcaccggcgtaagaataaatttcgaatcgaccgtcggctccagtagctcgccaaatgttggccgcaccgccgggtactgcgccgcgatgtcgcgcagcgtaaatccagcatgcagctgcagatcgcgacggaaacccaccagcacgatgcgctcccggtgttgaggcaagaaatggcgcccgtcaatcaccttcgggtcatccggcccggtatgccccgcgtcagctacttcatatcccagctcatccagcgtctgcatgatgatacggaaggtgcgcccctgatcgtggcttttgaggtttttgacattctccagcacaaaaatcgctggctgacgagccgcgataattctcaccacgtcaaaaaacagcgttccctgggtttcgcaggcaaagccatgcgcacggcccatcgcatttttcttagagacgccggcaagcgagaaaggctggcaggggaagccagccagcagcacatcatgctgagggatagattcgcgaatatgccgcgccgcctcctcgtcgctaacgtcagagcgttggctgagggtaatatcgcggatatcttcattaaaacggtgctgctgcggatcacagtaccagttggccttataggtgcgtaccgcgtgcttgttccactcgctggtgaaaacgcactgtccgccgatggcttcaaaaccactgcggatcccgccaataccggcaaacagatcgataaaacggaacccatagtgcggatgatgggccggcggcgaaggcaggagcgtcgccagatgagcaacttcctgcgggcgcaaacgctccgccgcgcggccaagcgccgccacgcgcttgaggatcgccgcgctccagtgctgttcgccgacgctcaccagttcggcaaccagcgtttttacatcgtagatcgtcatcagctgacgcagcagcgcctcagcgtgttccccggcctgttcagccaacgacaacgacctgtgttccttgcttaacttttgcggcatatcctcaaccaacgcggacgattttggcagagagtaccataaatcaccggtcggttgacgcctgcggtgcaaagcggcgcaaaaccgcttcatccagcgccagcggctccccctgcagctccgcgctgagcttagccataaattcgacgagaaaacgggcattatgctgcgccatcgctttccccttgtcagtttgcatggtttccggcaggcgcagaagtttgcactggaaatggtcgagggcatatttgcggtcatccagcgcccgccgatcagcaaaaggatcttcggcatcaaacaagatggtattcagagcgccggcgacagcgaagaccctcgccagaccaatggctcccagcgactcgagtcgatcggcatcctgaactattttcgcctccagcgtgcgcggtgggatcgccgcgctgaagctgtgcgcctcgatggcatggctgaccgccgggtaacgatccgcaggaaaatcagcaaaggccgactgcagaatggcgagggttttctcggcggccatcatcgaggatcgacttcgctccggatgattttttggcaagctgacgatgtcatgaaaatagcaggccgtaaggagtaccagccggtcgacttcctcccccgcggccagctgagtggcggtcgcccagacgcgacgaaaatgggacagatcgtgtgcggcgtcatcctgcgcatggtgcgtcagtatccagcgctcaaatcgttgctgccagtcaaccaggtccataggctttcctttatctgagggtcagcctcgagcatagcaattttagcgctgatgatcctgctcgccgcgggatggacgcgtataccagacgaccgcgccgagaatagagccaatgccgccgaggaccagcatacccaacagggcgccaagccatttcccggccgttgttccaaaatcaccctccacgctggcgccgggaacgctgtgaatttttcccactacccaccagtaacgcacaatgacccagacacaatatccgcaaaaagcatacaacgcccagagcgcaagtttccctcccgggctgcgttttgcctgctcttccatctcattcctctccgtgacacaacagactattgtcactcaaaacgtgacacgcatcacattataccgctaacctgcgtcacaggcagcagtttcatcttcgtcttctgcgccttctcgcgacttatgctgccaatgcgcacaggctgaagagatgtccttattatctcccgtacgctgaaagctattcattccttaaatatcgcaagctgggttgataattccctggatatttacattcacaaaaaataaatttccataatgaataatgcgtatgattattatttgcacaatttatttcataaaattaacaacgaccaaccaaagatagaataaagtattgctatataagaaaataataaattttgcacaaacatccaaatttaatataaagaaccacttagaaatattttgaaatgtttaacattatttatttacatattttattttaaataaagatgaacttagtcgttagtatcggatagtcattccggagggattgtcataattcatagtaattattattaaaagggaatatataatgaaaagaaaagtactggcactcatggttccggcattattaatggctagcgccgctaatgccgccgaaatctataacaaaaacggtaataaactggacctctacgggaaagttgacggcctgcattacttctctgacgacgcttcagaggacggcgaccagacctatgttcgctttggtctgaaaggcgaaacgcagattacttccgagttaaccggctacggtcagtgggaatacaacattcaggcgaacaccagcgaaaaagaaggcgcgaattcctggacccgtctcggctttgccagcctgaagtttgccgactgcgggtcgctggactatggccgtaactacggcgtggtctacgacattgaatcctggaccgatatgctgccggaattcggcggcgatacctacacccagaccgacgtttacatgaccggccgtactaacggcgtggccacctaccgtaacagcgatttcttcggcctcgtcgacggcctgcatttcgccctgcagtatcagggtaataatgaaaacgccggttctggcgaaggcactaataacggtgggaaacgtaagctggcgcgggaaaatggcgacggttttggtatctccagctactacgatctcgatatgggcatcagcttcggggcagcgtattcgtcttctgaccgtacccataaccagctggcggccgcgcgtagcagccagcgttatgccaacggcgataaagccgatgcctggaccgtcggcgcgaaatatgacgccaataacatctatctggccgccatgtatgctgagacccgcaacatgaccttctatggcaacgatagttttggcggaattgccaacaaaacgcagaacttcgaagtggtcgcgcagtatcagttcgacgactttaatttaccgctgcgtccgtcggtggcctatctgcagtcgaagggtaaagatctctacgcctattctcgctacggcgacaaggatctggtcaagtatgtcgacgtgggcatgacctactacttcaacaaaaatatgtccacctatgtggattataaaatcaacctgctggatgaagacgaccgcttctacaaaaacagtggtatcgcgaccgatgatatcgtcgccctcggcctggtctatcagttctgatccccgtcaaagcccgcgttcagcgggcttttttatgttcccgctccgttgagatcactcttttcgacattgccgctttccaggcgtaccttccctctttatgatgcgtttaagctcgttcgggctaaaagcggcgataaggtgccaaaaggataaagcgcgctaccgcgactctacgctgaaaccaggacgatgatgatggtgataccccagcgcaggcgttatacctgaagctaacggtgttattgaagggaaggttagagcaagaaaagtggcggagagagggggatttgaacccccggtagagttgcccctactccggttttcgagaccggtccgttcagccgctccggcatctctccgctgtgatggttgctataatgccaggatctttggcattttaatagctcccgtttcggtaattgtgttcaagtgacgactttgcgagcaatatgatgtttaaatggccctggaaagcagatgatgagtccggcaacgcagagatgccctgggagcaagcgcttgccattccggttttagcccatctttcgtccactgagcagcacaagctcacgcagatggctgcccgttttttacagcaaaagcggctggtggcattgcaggggctggagttgaccccgctgcatcaggcgcgcattgctatgctcttttgtctgccggtgcttgagctgggcattgagtggctggatggcttccatgaagtgctgatctaccctgcccctttcatcgtcgatgatgaatgggaggatgatattggtctggtccacaaccagcgggtggtacagtcgggacaaagctggcaacagggtcctgtagtgctgaactggctggatattcaagactcttttgatgcgtcaggctttaaccttgtggtgcatgaagtggcgcataagcttgatacgcggaacggcgaccgggccagcggcgtgccgcttatcccgttgcgtgaagttgccggctgggagcatgatctccacgccgcgatgaacaacattcaggatgagatcgatctggtcggcgaaagcgccgccagtattgacgcctatgccgccaccgatcccgcagagtgctttgctgtcctctcggaatattttttcagtgcgcctgaactgttcgcgcctcgcttcccggccctgtggcagcgtttttgccacttttaccgccaggatccgctggcgcgtagacgtgagaatggcctgcaggacgaaggcgatcggcgcattgttcactaaaacaacgtgttgagctaaatttagccatttgaatcagcaggttaattttagtgttgacacaaaaatgcgaggccagtagtatgcgcctcgttcacacgattcctctgtagttcagtcggtagaacggcggactgttaatccgtatgtcactggttcgagtccagtcagaggagccaaatttaaaaatcccgctcagggaaacctgagcgggatttttgctttccgtgatcctctccgctccccaagcatgcaatcttatcctggtgtaggtgctattttcttgctatgaggcaagctgaacggccgtgagccccacgctcccgcaaaggcttaaataaaggcggtttaaccgtgccggaccatacctgggtgtaaggcaatcatgcgcggttccaaaaaagatcggcaacaccgccgcttctgacatctctccgccagcgggtataagcagcatcgtaccgtaggtaccgtccaaggttccgtatgtgatccccgcaggtgaaaatcagcgatgctgctcccaaccttatggctacagactttcgatccggcggtaaccgctgggtctgccgctgcgtagcagacatggaggatgctgaaaacagcctgtccagtgcggcgatgacgcccaggggacggctacgggtggatgtaccgagtccgctggcccgccttattctggtgccggcgctaccggctttccacgaccgctaccctgatatccagatcgacatgggtgtgagcgaccgggtagtggctctgatcggcgacaacgtggattgcgttctgcgcggaggtcaaatcaccgaccagtccctaatcgcacgccatgtcggcgatttgcaaatcggcgtctacgtcgcccccagctatgtggaacgccttggcgctcccgcacacccgcgcgagctgcaaaatactgaccattgcatagtgggattcttgtcctcacgcaccagtaagattgatcctttggtactgtgcagtgagaatgaacgtattgaaatcacgggcaactacgtacttgccgtggatgatggcaatgcttacctcgaagctgggttagttggcttaggcgtgattgcgctgcccaactatatggcggcagcgcatcaggccgttggcgctttgattccattatttacacaatggcggattagcccaatgcctctgtacctggcgtttccaccgaaccgccatgtcaacgccaagctgcgcgtttttattgactggatcgttgaattgatggagcagcatgtccccattgccaacaatcagtgacgccatcccctgattcgcttatcagcggcgatggggttcagcggtagtgactgtggtcaggcgtgttttgacaatagggattcagcagaactcatccgtcttatattctggataatggctatcataaaggggatcttcgctttcatggacaatggcagccaaaaaaaagatcctcagtaacaatattaagtccatagatatatttgcagactttatcatcccctcctgagcatctcctggcgccctcattaaaacgccatcaccgccactgctgataagttaaggatcggtttcccgatccttattcccaacaacgttgaatgcatcgacagcaaaagagccttcttacaatagccgttaatcagactaaacgacccgctacaaacttccctgcgccgctgtggcgctgatattcaccggcatgccggagcggcgctgcagggtctgctcgacctgggcagggctcactcccggcccctgggtaaagtcgcgcagcgccgaggtcatcggcaaggggacttttctgtcggattcaaactccgcgcggttgcgcgacagcggctcgtgcacctccagccagtgactgccgtccggctccacgctgtacttcaccggctgatcgatcagctgaacccgcgtcccaaccggcacgttatcaaacaggaatttaatatcgtcattgcgcaggcggatgcatccctggctgacgcgcagcccgataccaaagttggcattggtgccgtggatggcgtagagcctgccgatgtagatcgcatacagccccatcggattatcgggcccggggggcaccatcgccggcagcgttttgccctctttcgcatactcgcggcgggtattggcggttggcacccaggtggggccttcctgcttacgctctactgccgtcacccagttacgcggcgtttcgcgtcccgcctggccaatgccgattggcaggacttccacgctgttgcccagcggcgggtaataatagagacgcatttcggcgacgttgatcacgatcccttcgcgcacggtgtcgggcaggatcagctgttgcggaatagtcagcgtagaaccggagcgtggtaaatagacatcgaccccggggttggcttccagcatattgcttaacccctggccgtactgggcggcaaaactttccagcggctgggtgttattgtccggaacggcaatggtaaatgcgctgcccaccagacggctcccctccggcggcagcggatagctgatggccagcgcgccgtggctggcaagcagcatcagcgccgtacagagtaatttcacacgccgcatcgtcattttcccttcctcagtcgcgactcacgtgtgtgaattatagcgttatttccactccccgacccgctggccagcatttccttaaatctgatagtcgattgcgacctcttccggctccatcgcctgacgcttaatctcatccagcgacagtccggcattgcacaattcgataaagcgccaaacgtaattccgctgcagctggccccgcttcagtcccaaccacacggtattggcatcgaacagatggcgggtatcaagacgcgtaaaggtgtccgcttcccgggcatcaccggactgctcggcgaccagcccgacgcccagccccagctccacgtaggtcttgatcacatcggaatcctgcgcgctcagcacgatatccggcatcaaccccttgcggttgaacgcctcatcaatgcgcgaacggccagtgatcccctggcggtaggtgattaacggccagcgggcgatcgcctccagcgtcaggggagaaacctgcgtcaaaggatgctccttcggcaccagcaggctgtgatgccagcggaaccaggggaaagccgccagcgtcggatcgttgctcaggcgctcgctggcgatgccgatatccgctccgccgttatgcagcagcgcttcgatttcctgcggggtaccctgcaccagctcgacgcgaacatctgagaacagctcgcggaaagctttaatgaccggcggcaggctgtagcgcgcctgagtatgggtggtggcgatagttaagacgcctgacgcatcgttagtgaagagatccgccagccgccgaacgttactggcttcattgaggatccgctcggcaatcgataacagcgctttacccggctcggtcatgcctaacaggcgtttgccgcggcggataaagatctcaatccccagctcctcttccagttcccggatatggcgactgacgcctgactgcgaggtatagagcatattcgcgacttccgtcaggttgtaatcctgacgggccgcctcacggataattttcagctgctggaagttcaccctttcctccgggccaatggacttaacgtatctgctattgttaaagtctgttgtcccaggtaacaaataataaaaaccagcaacttattccttaagagaatataccctaactgaccagctgcagttcacggttttccagcgatgggcggctcaccagagacagcaggatctctttcaccgcctgcgcctgcggcgacagactgccgcgagccgacatgttcagcgacagcgacaggctcattgaaggcgtgctgatccgcgccatccagccgttcgccgccccgcacagggaacgggcagcggattccggtaacaccgtcgcccccatgccgctggcgatggccgcggtcagggtggtaatggattcgatctcgccgataattttcgccgatagacgacgcagggtgaatgcctcagtgacccgcgcccgcactgcgctgtaatcgcgcggcaggaacaggttcatctccgccaccgccgtgagatccacgctctgccccgggcagtcgcgggtgccgaccaggtaaaggtcttctttcagcagcggctggctgacgatgcctgccaccggcgaacgctcatagagcaccgccatatccagctggcccgccagcagcttgtcattcagcgctgtgccgctgctctcctgcagatagaccatcacctcaggcaactcattgcgcaccgtttgcagcaacggcatggtaatggcggaggccgcggtgcccggcgccaggccgatcgacacctggcctcgcagcgtctggccgacgttattgaccgccagctgcgcctgctcgcactggcgcaggatagtgcgcgcatgggtgtagagaattttaccggcttccgttggcgtgacccctcgcttggtgcgtatcagcaactgctggtccatttcaccttccagggtcgcgacctgttggctgagggccggttgggcgatatgcaagacttcagcggcctgggtcagactgccgatatcgacgattttcacaaaatatttcagtcgtcttaagttcattttgcctcctgtaaggaacgccagcgtcaacgctgggagtatgatgcactggcttttgcaatttgcttgccagctttgcatttcctcggctgtcgcccgccgcaggcagtgttataagggatagtgatagcaattcggtttttatttgcccggtaagcagattgtggtatgccccattaggggtacattcgcactacaacggtgcaacatggtgaaaaaaacagcgcatgggtggcgattgctgaaattgtcagcagtcgaacgcaattctttgaatcaggctttgacaaggccggatggcatcgttaatatgcgccccgttcacacgattcctctgtagttcagtcggtagaacggcggactgttaatccgtatgtcactggttcgagtccagtcagaggagccaaatttaaaaagcctgctttcgagcaggctttttgcttttcagcgccggtacttctgccggaaggcgaatggccaccctccggcgattgcggctttagcgtaaactctcttccttcagatctatctcccgcagcacctcataaaaagtgatatcgctgatgttatgggcgcggcgcagccggaacagctcctgacgctgggcgataatgacctctcgttgcatatatttctccagcctggcgcgcttagccagctccagcccgacatcctgcccctcgtcattgtcgttatagtgaagccgccgctgataggtttcgagcagcatattgccggcatcggcccgcagggcctgctcactgggatcctccaccggctcgtccagtagcgcgttaagacggttaatggccacctcggtcatcacggcgccaatgtcgtccttaccggtgtcatgcggtagatcatcggcaagataacgagtcataaacggcagaccgatagccgccaccaccagcgacatcaggatcaccgccatcgaaagaaagatcagtagttcacggcccgggaacggcgaaccatctgccagcaccaccggcagcgtcagaataccggcgagggtcacagagcccttcactcccgccagcgccatgacggcgaggatactgaatcgtggacggacggtgatggccttgccccgacgtttacggcgaaaaattgtcagcttcatcgacagccatacccaggcgaagcgcatcagaccgagcgccagggtgatggccacggcgtacagcagcagataccagggcgaagagacgccggcctggctggctaccgccggcagcgtcctgagcatgcgcggcagctgctcgcccagcatcagaaagatcatcccgttgagggtggtctgcagcatggaccataccgcgctgcttttcatgcgcgtcgccggaagccggggccccgacagctgctcataatgcatcgcaatgccggcggcgacggcggcaagaatgcccgagacatggaacgcctcggccagcaggtaggcggcgaaagggataagcaggctgatcaggatctggatggctggctcctcgcgggtgcgccgaaccagaaagttattacatttgccggtgacccacaccaccacgaggccactgaggatgcccccgaaggccatcaggaaaaatttcaccaccgcgtctcccggggagaagctgccggtcagcaccgcggcgatggcgaagttaaaggcgacgagccctgaagcatcgtttaacaacgactccccttcgagaatatgcgccatccttgagggaagcggcgagctggcggtcattgccgataccgccaccggatcggtaggcgacagaatagccgcgagggcgaaccctgccgccacggtgatagccgggatcagccagtgaataaacaggccaataccgagaatagtcaccatcaccaggcctatcgccagcgataaaatcggcttcatatcgcggaaaaaagcgtctttggggatgcgccagccatcgaggaacagcagcggcgggataaacagcagtaaaaaaatatgcgggtcaaaatcgacctgaaagccactggcggccagcgcggcgcccgcggcgatttggatcagcggtagcggcactttaacgggcagaagatgggacaggaacacggtcaccacgatggccatgataaagaccagcacgatagcaattagcgacattcatcccctcctctgacggcaatattcattctgtacatcagactgttaatcctttttcgcaggtgttgtttcggtaacagattatttacccagtcaccgataattaatgacagacgtcattgtctgccggcgataatatttaaactgaggtggcaaccggtgccggatcaggggtgacaatgtcttttatcaagccgcgtttgtcaatccgctatcgtctgcaaatcatcgccggccggcattccggggagaagtcctcacgggactgtcgaccgggtacttcgcaaattggcctcttcacatggacaaaaccactcaaccgctccagccccccgctgtttatatattcccaatattattaattcgtattatgcattgtgaatatggatattaatgaccagtctaatatacccggcagagttatatttcgtgcccccgccggcagtgcgaaccacgtatttgcgataaataattcttaacgccccccagttcaggatgattggtcagccagccttacgctacgcgcaatgcttgccctacccctaaattgggcgtaccctgaccaacaattaaaccacacggtctaaatcatgaatcccgatacctccgccgtcctgaagccccgccgcggccgtccacccaaggtcgatcgccagtttgacgatacgcgtcaggcgctgattcgctcaggccttgaagtgctgaccgaaacgggctatctcgcggcgggtattgatgcggtgatcaagaatatcgccgtgccaaaggggtcgttttatcattgctttaaaagcaaagaggcttttggcctcgccgtgcttgccgcctatggcgacttctttgcgcataaattagataaattcctgctggacgacgccgtgccgccgctggaacgaatggcggcctttgtgcgtcatgccggtcagggaatggagaaattccagtttcgccgcggctgcctggtgggcaacctgctgcaggaagccccgttgttacccgagacgtttccccaacggttgatggctatcctggcggcatgggagtcgcgcgtggcgcgctgcctgcgcgaagcgcaggcagccggggccatcgccagcgacgcctcaccgcaggcgctggcccaggtgttctggatcggctgggaaggcgcggtgatgcgcgccaggctggtccagtctgccgcaccgcttaaccagtactgggatttttttgcgcacagtatgacaacaaaaacacctgcacaggacggcgctagcgccgataacccccttccgacgaggaatactctgtcatgaaagcattagttctggaccagatcgacaaccgcaccgtcgccaccgtcaaagatatcgacctgcccgctcttgccgaaggcgacgtccgggtcgccatcgactggtcgagtctcaattataaagacgctctggcgatcaccggcaaaggcaaaattatccgtcagtttccgatggtgccgggcattgattttgccggtcaggtgaaagaaagccgcgatccgcgctttgttcccggccaggccgtgatcctcaccggctggggcgtgggcgaaaaccactggggtggcctggccaccgaagcctgcgttaaaggcgactggctggttgctctgccggagacgctcagcgcgcgccaggcaatgatcatcggcaccgccggctttaccgcgatgctatgcgttgatgctctcgttagtgcgggtgtcacccctgacagcggggatatcctggtcaccggcgccagcggcggggtcggcagcaccgccgtggtgttgctcaaagcccttggctaccgggtgacggccgtatcgggccgggaatcgacacacgattaccttcgccagctgggcgccgatacgatcctgccgcgcagcgacttcgcggagacccgtccgctggagaaacagctgtgggcgggcgcggtggataccgttggcggcccggtgttggccaaagtgctggcgcaaacgcaatatcgcggctgcgtcgccgcctgcggtctggccgggggcttcgatctgccgaccaccgtgatgccgtttattctgcgcaatgtgcgtctgcagggggtggattcggtgatggtgccgaccgctgaacgcgacgctgtctggcagcgtctggcccagcttctgccggagagctactaccagcaggcggccacagaaatcacgctggagcaggcgccagcgtatgccgcagatttcctcagcaataatattcatggtcggacgctggtcaatatcggccagtaatcctcttctcccggcgcccgtgcggcgccggatcccgagagggatcaaggcatatcatttccttccccacgggattatgatgacgcgaacgaatagctctgcgagtggtaaaaaaagtaaatggatgtcataagcatcattatggcggcgggcaagtcgtccgttgacgtcgcgctgtatacgctgttgccgatcatggtgatcatgctgatcatcatgaaataccttgaggtccgcggtatcctcgatgtgattgttcgctgggtggcccctctgctgaagcccttcggcttaaccgggatgagcgccttcgccctgatccagattaactttgtcagctttgccgccccgctcgccacgctgtcgattatggataaacgcggcgtctcggaccgacaaatggccgccacgctggccatggtgttcgccatggggcaaggcaacgtcttctatcctcttaccccttttggtctgcactggctggcctcgatcgttatctcggtggtcggcggcctgtgcgcggccgccgtcgcctggcacgtcaccggacggcgcttatcggtcgccgagaacccccgcgcggaagcgctgccgaacgccgagcagaacagccagggaattctggccgtgattaatagcgccggctccgacgccatccgcctggcgctcggcgcggtgccaatgctgatcctgtcgttaaccatcgtcgggctgctgcagggcgccggggctatcgacctgctgcagcagctgctgaagccgcttctcagctggctgcacatcccgcagaactttgtgctgccggcgctggtgaagtgcgttgccgggggcaccgcctactttggcgtcatttccgagctgatccagcagggcaaagtcaccgtggaccaggtcaacgcctcggcaggtctactgatccagacctttgatcttcccggtatcggcatttttcttggcatcagctcacggtttgtccgcctgttccgcttcgtggctcccgcggcgatcgtcggcatcctgctgcgtaccgttctgcacctgatcctgttttaacgcctctgctctggcctgcgctttcaggcaggccgccaccgccgcctgttcgccgcaggcgatgcgctcatcgacgcgcgtcatcatccatggaaagaatggattggaggtgacgcgcattaacgtctccagccccacgctcagcgtcccggtctctccgcgcagtgaaatggtgcccaggctaatgccgtagcggttcttctcgtccggctcgcgaccatacagcgagtcgctcaggggaaacggcaccgccacatgcgacaaagagtacatatccgccggccaggccaggtgtaaaggataacgatgctcttcccgttcctgggccagcgtggtccgggcgacggtctgcagcgtgtgcgccgtcgcgttggtcaccaccgtggtggtataggcccgcggcgccgggggcagcagcgtattcaccgccgcatagagcgcagggcgaaacaggccccggagatccgccgcctggttaatatcgaacaccaccagctcgctgccgttatccggcagatagcgatacagggactccaccaccgcgcgggtgctgaccgtggaatccatcaccgactgaaaggtgaggatcggcggcagcgctttcagctcgccctgccgggccgcgcggataatctgctgctgcagcgcctggctcaataaccacgattgtctcgccgccttgaccggaaaggagttgtacttgaacggattaaactcaggcgccacgttcagccaggccgcgcgggcgaacgccgggaagacggacggtagcccggcgaggccggcgaaacgggcaaacgcggtcacgccgatcatcggcgacagcagaatgatctgctgcggctggcgcaagtgattgtcttccaggctatcgagggcatacttgagcgccagcgcgccgccgttagagtagccgaccagatgcagcggcacgtccgccccggcaaggcgggtcgcttcgcgtaccgccagacgcgtcgccgccagccaggtctcccagtcaaccgccgttaacgcccccggcgcggtgccgtgtcccggcaaacgcggcgccaccgccacataaccccgctgctgccagagttgcgccagatagcgcacgctgtagggcgaatcggtcaggccatggaggagcaccacgctgccgcgcggcttgcccagcggcatcagcacaaaagaacggttccagtcctgcttaaactgccccggccagacccggctgtgacgataaaagcggttgaccggggttttatcttcctccggcaaagcctctgtcacctcacgctggagatcggcgaaaatcgtcttctcccgcgccagatactgggcaaaggtcgcctggtcgatctcttcggccgacatctcgttgccactccaggtatgccagcgatgcagggccgggccgcgctgggactcatagatccgcccggcgagaaagaccaccagcagcgccagtaccgcaatgctcccttttttcagcagtgagccgataacggcgccggacgttcgccagtgtcgaaatagatgcttcatgacgctctctcttatatttattgcgtagccggacttatcagccctcttcctgacaggctattctcacggtctgcttttcagcatagtcatcgcttcctgcaaattaaacccggcagatcattgccccccggcataaaaaaacctagcgcacagatcaacaatcggttgcgtatttttaaacactgcataaaccaaggggataatcttattgtcagatttttaagaaacatgaattatcgacgcacatgtcgctatgagaggataaaaaacagatggagtggtgggtaaaaaaagtacaggacaacgcttcggccagcctctgccgcgtcgtgcttcagagcggtgcgctggagatgatcgcagagattgaagcctgtcgcctccgcctgcgggaaggggataaactcactccgctggccgatgcgcgctattgtctgaataataatccgacgcaaactttgaagatccgcaacgccactcattatagcagcgagcgttggacaaacgccggcaaataacacgagcccgctccttttactggttatggtctgagtatcgtcgcatttgacagataaattctccttcgcccttttcccgctgtgacatactatcgggaatgtcagcagacctgaaacaaggagcgaatcatgaatatcaaggccgccagtctgaccccggaacaagcgcttgccgagctggaagcgcgctatgaagcctcggtcacggcgttacgcaaagccatcggcgactatatcgaccataatacgctccccgataccgaagcccgcgcggaaggtctttttgtctatccgcagctgtcggtctcctgggacggcgccgatcataaagccctcaaaacgcgcgcctggggacgtttcacccatgccggttgctataccaccaccattacgaatccgaaactgttccgcaactatttgctggaacagctgaccctgctgtatcaggactatggcgcgcatatcagcgtcgagctgtcgcagcatgagatcccctatccttacgtgatcgatggttccaccctgacactcgaccgctcgatgagcgccggtctgacgcgctatttccctaccaccgagctgtcacaaattggcgatgagaccgcggatggcctgttccatcccaccgagttctatccgctgtcgcactttgacgcccgccgcgtcgatttttcgctggcgcgtctgcgtcactacaccggcacgccggcggaacacttccagccctacgtgctgttcaccaactatacccgctacgtggatgagttcgtcagctggggctgcagccagatcctcgatcccgacagcccctatatcgctctctcctgcgccggcgggatctggatcaccgccgagaccgaagcgccggaacaggccatttccgatctggcgtggaagaagcatcagatgccggcctggcatctgatcacccacgacggcaaagggatcaccctgattaacattggcgtcggcccggccaacgccaaaaccatctgcgatcatctcgcggtactgcggccggacgtctggttaatgatcggccactgcggcggcctgcgcgaaagccaggccatcggcgactatgtgctggcccacgcctatctgcgtgacgatcatgtactggatgcggtgctgccgccagatattccgatccccagcattgccgaagtgcagcgcgccctctacgacgccaccaagcaggtgagcgggatgcccggcgaagaggttaagcagcggctgcgtaccgggacggtggtcaccaccgacgaccgtaactgggagctgcgctattccgcttcggcgctgcgctttaatctcagccgcgcggtagctatcgatatggagagcgcgaccatcgccgcccagggctatcgcttccgcgtcccctacggcacgctgctctgcgtctcggacaagccgctgcacggtgagatcaagctccccggccaggctaaccgcttttacgagggcgctatctccgagcatctgcagataggcatccgggcgattgacctgctgcgcgccgagggagatcacatgcactcgcgtaagctgcgcaccttcaacgagccgccgttccgttaatcgtcgatgacgtgggaatcgtgagataaacgctgacgttacccgccagggagcgtcagcgtccggagaagcgaaacaaacgacccggcggtgtttgtccacggaagaaaggcggtagacagaaaagcaaaaagcctgctcgaaagcaggcttcttaaatttggctcctctgactggactcgaaccagtgacatacggattaacagtccgccgttctaccgactgaactacagaggaatcgtgtgaacggggcgcatattatcgatgacgcccggcgctgtcaaagcctgttttcaataaaatgaatcgtttgccgaattattcttcactttgcgcaaaaaatggcgtttagcctcgcaaacgactcagctttcctccgatgaagcctttacgcgcggatatttccacagccagcggccgctcaccatgcggaaataaaacagcacgccgcgcaccgcccagtcgagcaccatccctaaccagacgccaatcacccccatccccagcacgatgcccagggtatagcccgccaccacccggcagccccacatgccgagcatcgacacccacatggtgtagcgtacgtcacgggcgcctttaaaagcgcagggtaaagtccacgacagcgaccagatcggcataaacagggcgttgagccacagcagctgtttaaccacttcttttacatcttcttcatgggtgtagaacgaggcgataaagccggcgaagggggcgctgccccaggcgatcagcgtcagaatgatcgtcgacagccaaaatacgtgccaggcctggaattcagcctgaccaatctgcccttttcccagccgcttgccggtaatgatcgtcgaggcagagccgagggcgttgcccggcaggttaattagcgaggccaccgaaaaggcgataaagttgccggcgataacgttggtgcccatcccggcgacaaacatctgggtcagcagcttgccgccattgaacaggacagattcgatactggccgggatgccgatccccatcacctcccagataatggcgaagttaaagggtttgaagtagcccttcagcgacagccgcagcgccggattgaggcccaccatcagcacccagatcgtggctaacgcgccaatatagcgggcaatggtcagcccaagcccggcgccgacaaaccctagccccggccaggagaagatgccgtagatgagcacgctgctgattaagatattgaggatgttcatcccgccgttgatcagcagcgggattttggtggtgccggcgccgcgcagcgccccgctgccgatcagcgcaatcgccgccgccgggtagctcagcgccgtcagttccagataggtcagcgccaggtccttgacctgggcggtggcatcgccggcgacaaaatcaataatctcctggccaaaggcatggatcacccccgccagcaaaatggaaaacagggtcataatggccagcgactggcgcgcggccgccctcgcccgccgccgatcgcgcttgccgaggctaaaggccaccaccaccgtggtgcccagatcgatggcggcaaagaaggacatgatgaccatgttaaagctatcggccagccccaccccggccatggcctcttttcccagccagctgacaaggaaggtgctcaacacccccatcagcagcacacaggcattttccagcagaatgggcacagcgagagggctgatttcgcgccagtacagcacacgataacgctgacgttttttaaaccaggatgtccgttcgacggcctggcgtacggcggaggtgacgttcaagagagaccttagtgagaaatgttgaaacaacatttcaaatgatgattgagaaatggatatcctgcaaagtattttccgtaataattgtcggaaatgacaacaaattgtcgatggaagcggcagttgcacctgaacaggcgaattgatgtttgacaaaagttttttcgccgctaagatacgactccacacgattcctctgtagttcagtcggtagaacggcggactgttaatccgtatgtcactggttcgagtccagtcagaggagccaaatttaagaagcctgctttcgagcaggctttttgcttttttgcgtcgctgacgttaactcagcatcgcatccagcctggcaagcacctcgttgacaacgacgtcaggtatgcgttccagacgcttgcctttccctaccgcctccctacgccccgcgtgtcctccgtgaacgcaccccagctcagcctgaaaaagcgcctgccagtaggatgaattcactaccgtttgcgggtgagatagcgaggattatccactctgtctaacgttatacccggaggcaccatgaacctcagacaacagcaacagcaggcgttcgatcgcagcggggaacctcttatcgtcggcaacgtcagccactgcccgctgccgccggagaccctcgccgcactgggccccgattccccctatgtggtgcaggtatacggctcaggcctgaccggcgaggtttatcgtctgcgcatcgccggcaaggagtacaatttaaagaaacgtcgcgccgtcgccggcgttgccaacctcaacggccagctgtcgtttttaaatgaggtacagcgtcggcaggcattgcaacagctgaaggatgacccggtcaccgcgccgcgcttcacccacatcgtcccaacgctgtatgccgattatcgcctcggcatcctgctctccccctggatcgatggcgagccgatacaccagttgaccccgccgctgatcgcccagctatttactactctggaagcctgcgaagaacaggggctgatggagtgggatctctgtagcgggaatctgctggtggaccggcaggagcagttatggctgttcgattttggctatatgtatcccttcgacccgctgagagaattcaacagcaatggtctggccgacccgctgttccactttgtcgaacgttttgagactcgcttcttttttagctggctgatgacccggatccctgacgccgaacagcagctggcgcaatatcgcgagatgaagcggctggcggtcgaaagctaccgccgaaagctcgtctggcttcgcgcccggcgcgctgacccgctggtgctggctcactttcagcagttgacggcgcgctgggagtcggcgctggcggaccctgccgcgctgagccagctgtttgccgtagaggcctttcgctcacatgtgctggatattgaagacgacctgcatggtcagtcctgtaccttactcaccctgcaacgcattgactgggtgataaaccagctggaacagcattatcgctttatcgccgacgaaggcggcctgttttacgataacgaagggaaatcgcagcaggcgctgctcaacagctatgcgcagaagcggcagcaggcgcaacagtacctgttgaatgccaccgccgcgaaggattaacggcgctcgcgtccctgcttctgcttcgcctggtacatcaggcggtcagcggtggccaccagcgcgttgagactgggatggctggcgggatcgtattcgacgcagccccaggagaacgccagctgccaggggtgagccgcctgctggttgaaacgcgccacgttgtggctgagcgtctccatcgccgtcgcggcatcgtggcggctggtattggcgaacagaataataaactcatcgcccccctgcctcgcgaggatatcggactcgcggaaggccgctttcatcaagtcggcgatggcgatcagcgcgcgatcgccctcttcatgcccccaggtatcattgatgtgcttgaagcgatcgaggtcgacaaacgccaggctcaccggctcatggcggcgctgggccgtcagcagggcatactctgccagggtgaggaatccccggcgattaaacagtcccgtcagctcatccgaggttgccgcatccagcaccttgaactcatcctccacgatcgccgccagatcgcttaagatctgcatttcatgggcggaaaacgatcgcggctggtgatccatcaggcagaacgacccgacggtcgcgccatccggcagttgcaccggatacccggcgtaaaagcggataaacggcgcctcaatgaccagcgggttatcgtgaaagcgctcgtcctgctgcatgtcgttgacgataagcgggtcggtttgcagaatggtatgggcgcaaaatgaaatatctctcggcaccgtgtccacatcgagaccggcacaggacttgatatgcaggagatcttcccccaccagactgatggacgccaccggcaggttatacagcgaacgggcaagcctggtcaggcgatcgaagcgttcttcttttccgctattcaacagcccggaagagcgtagcgattgcaggcgacgctgctcgtcgggatgaagtccggctaatttcattgtctctcacttgtctcttgcgcagaattccgccgggtttccgcagagaaacccggcgttttatcctgcgaggggaaaatagtcgtcaggtaccccatgagttaagcagatttcctctgcacgtcaaccggcgcgccccaggcgactggcgcccagggcgctggcggaatgccattaacggcactctgcccggcaaagagggcagatcaggcgcggataaacgccagcagatcggcgttgatggtatcggcgtgggaggtgtgcatcccgtgcgggaagccaggataaattttcagctggctgttcggcagcagcttgtcctgcaggatggccgcatttttataggggaccacctggtcgtcatctccctgcatcaccagcaccggcaaagtgatcgacttaaggtcttccgtctggtcggtctctgaaaacgccttaatgccttcataatgggctttggcgctgccgatcatcccctgtcgccaccagttctggatcgtcccctgggatatctctgctccatcacgattgaagccatagaacgggccagaggcgacgtcgagatagaactgggcgcggttcgccgccagcgctttgcggaaaccgtcaaacacctcgatcggcgtcccgcccggattctgctcggttttcaccattagcggcgggacggcgctaattaacaccgccttcgccacccgcccctgcggctgaccgtagcgggcgacgtagcgtgcgacctggccgccgccggtggagtgcccgacgtggaccgcattgtgcagatccagatgttccaccaccgccgaaacgtccgccgcgtaatggtccatatcgtgcccctcgctaacctgatcggagcggccatgaccccgacgatcgatagcgatgacccggaacccttcggcaaggaaaaataacatctggttatcccagtcgtcagcgcttaacggccagccgtgatgaaagacaatcggctgagcttcctttggtccccagtctttaaagtaaatgttgacgccgtcttgggtggtgacaaatgccatattacagactcctctttcaggataaccagcctgcaggcccgtgcctgggctgaacgccgacggcggccggcaggagtgccgaccgcacaggaatgtgatgcctgtaacagtgtagaagatatttaacgccgggcgggacaacttaccctgtctcgcttgattcgccgatcctggaccagaccgcgtctggtatcaggccgcactctcctgctggcggatccgcaccatcagcgcgccgagcagcgcccagtcaagcagcacggcgaaggcaaagcagacgccatggcgtcctcctcccgcagtatgccaggtcagcagcgtcgccgcgatggcgatagctacgctcagcaccgtggcgccgctgacccgcatccccggcagcgccgtcctacccgccgcaatgcgccaggcgacagccgctcccgccccaccgcacgccacgcccggcagcagtgccggccagtcctgcccgccataccaggccaccagcgccagcagccagccggccgctgacagcagaaaggcccagcgcgtcgccgccaggggtgagcgataaagccaggattgtccgcgagtgaatccccacccgacgccaaaggccgcaatcagcgccgtcagcagactcagcgtgccggtcaccccgataaccgggggcatgattaacagcaaggccccggcggcgatgaccacgctaagggcgatagcgcggccgcgggggtcgatcgttgccgcggcttccgcggcggtgtagcggcttacaacgtgcatagttgactcctgacaggcgaagctgcatgaatttaattcatgtcattgtctttacatgcccgtagcctatcgccacaatatcgccttacacaaacgcatagttttcagccatagatgagaaaaactcagccatgagaccgccccgtctgccgccgctgggggcgctacgcgcttttcatgccgtcgcccgccaccgcagttttaaacaggccgccgaggcgctcggcgtcagcgcgacggcggtcagccatcagattaaactgctggagtcggtgctggagtgccgggtctgcgaacgcagcgcgcagggcgtcagtctgaacgctgatggcaagatcctttacgcggccacccaacgcgcctttagcgccctggaacaggccgtcgtccagatcgctcatgcccgtcagccgccatccttaaccgtcaccaccacctccaattttctcacccactggctggtgccgcggctggcggatttcaccgcccgctttccggctatcgacctgcggctacacaccagcgtcgaacgagtggatctgcatctgggcacggtagacgccgcgattcgctatcgtgaaacgccggagccggacctgtactgcacgctgctgtatgaggatcgctttatcgtggtcgccagcccgactctgggcctcagccggcctgaagatctgcagcgggtgacgctgtttcacgttgccaaccggcgcgtgccagctgattcgccgagctgggagaactggcgtcggcgctatggaccgccgacgctgaatattgatgcggggttaacctttagcgatgagacccatgccctgcaggcggcggtggccggtcagggggtggtgatcgccagcgaactgctggcgcgggatctgctgcagcgcggcgtattgtccgcgccgttcagcaacgcattgcctggcgcccgctactacctggtcactaccgaagcggtagcgcagcgggcggatattattgctctgcgggagtggctgctcagccagatggcgtcgggcgacggcggccatccgactgcgggatagcgggcttaccagccgcagacgttggtctcttcatcggactcgtagccgcgaacgatattgatcagatccttcaccgtatcagcggcggtgagcgggtcgcgcagcgccgccagcgaggaaaaggttttatcaaccgagacgccgttattgttattggtgaccgtcaacagaaactccccctcttccctgtcgtccggcaacttgctcagcaggtcattaacggcctccaccgcctgctgtggaatatacaacaccattggtttgagaaatattttttcctgcttctggtgaagtcggccattctctagcgctaaggtataacctttattttcactggtcatctcttgttatccctcgatgagaatttttggatcaacataaaagtcgacattaaaaaccgtgtcctctgagagggcctcaatacagtgccacttctccggcggaaagacgccaaactggccggcttcaatagtcagggtttcaacgggctcggggctggtttcatcggcatagccgagatagcggatcgccccctgcatcaccgagagacgagggtagacgccctgccgggtgccggcatccagatggcggcgccagatagaggccggggcggtctctttggtccacagcggcgtgctgcgggtgtgaacgtaatgggtgggaataatgattcgctgcatgattgtgcctcactttaccgtctcaaacgcgacgttcagaaatagcctatatgatgcatatcatataccccttttaaacgttaaggatattattttgttgtggaattttacgcctactcctttttatacctcgcagggattagcgctaagagaaaataaaaaaggcgatttcaggatcctgaaatcgcccggagaataaaaataaacgcgttaaaaatttgttagcgcagcggactcggtttgccgattaaatatccctgaaccaggtcacagcccagcgcctgcagcgaagccaactgctcttcggtctctacaccttccgccacaatgcgcatatgcaggctctttcccatgctgataatcaggcggacgatatccagatcgtctttttgttccggaatattgatgacaaacgagcggtcgattttaattttatcgaacgggaagtagcttaaacgggacagggaagaatagccggtaccaaagtcatcgatggagatctgaatgcccagctcgcgcagctggctgagaatttccagcgaacgggtgttctcattgaatacgtccgactcggtgatctccagatcaagacgtcgcggatcgaggccggtctgatgcagcacctcgataatggtgtcggtcagcgatgtattcatcaactgaattggtgaaacgttgaccgagaccttcagcggcgtcgcccagctggccgcttcggcacaggcggttttcagcacccattcgccaagggcattaataagaccgattttctctgccaccggaataaacaccgtcggcggcacggcgccgcgcaccggatggaaccagcgaaccagcgcttcatagccgtagatttcgcgcgtgacggtatcggcgatcggctgatagtagactttgaattcgtcatgggccagggcctgcagcagatcgtcttcaaacgatttgttctcctgcaggcgctgcagcatccccggccggaagatttgcacatggccgctaccctcttttttcgcctcatacagcgcgaggtcggcgcacttgtacagataatcggtacggctttcaccgtcagagatcacgatcccaatgcaggcgtcgatattaatctgcgcatcgtagatctgatagggctggctgatcttctcccggataatattggcccgctcaagggccatctcctcagtgagatcgtaggagagcatcgcaaactcatcaccgccaaggcgatacagcgtctcggaggttttgcggaaaaaagagaggcgactggccagatcctgcagcagcttatcgccagcatcatggccaagggtatcgttcacatccttaaagctgtcgaggtcgaaaagcatcaccacggcgcatcccttatagggacgcacctggttgacgatctcctgcagccgctgccagaaagagagacggttgggcataccggtcagcgaatcatggtaggcatcgtactgcagccgtcggttctgcacctgcagcttctctttcgaggcctgcagatcgttggccagcgttttcatacgaacatgggcgcgacgcagattattattctgtcggagcatcagcagaccgagagttatacacatggcgatcagcagaatggagatcaccgagtagatataatagagatgctggattttatcatgggtgatattaacgatattgatatcttgcatcagggtggcagcggccattgaggtcagcggaccatccagctcgcttaacaccggcaggatctgtctgacctgctccggcgtcatggtatcaacttgtttatcgagcagatgaagattacgaatcagcgtcgcaaccaccgtcttccgctgctcgcttttattgataaatttacccagatcgccctcctgcagaagctcgatctggctcatcatgatctcaagacgcaggcgcacctcatcgtggtccgccccttcggccccaatcgccattcccgccagacgagactccagccgcatatattccgacaccatctgcgacattgaccacgagtccgtatagcgggtaaatttttgcaactcactttgtcgctcatgcaccagataagtaatatatccggtgacaacaaataacgacaaaataatagccgtgagtattcgattcaagatccaacccttattctataatcatctttgaaacttgccaggccgatcgggaataatagatctggttctgtaattcagcactgctgtcgtaagggtagacaataaataacgggcctttatcacgaatgcgcatatattgaccgttcatttttaacgccataatgaccgggaatttataaaaatcatcaatcgggataatggtggtgtagtcgttcagcgccagcacgcgggccgatgtgcctttcgcgccgactaaatccatgagtttactaaggggaataccgtcaaaacgaaccttgccggtgtaccagggggtggtggtttctatcgtcttcatccccagtttttccagcattgcgagatcaaaaacggccttgtcgccgacattcatatttccgatttttccggaaatggtcagtacaggttttcctgtcggcgcaggcagtttttcagcataagcagaaggcaacatgacacaacaaaataaaactgcaagaagtagacgcattttactcaccattccagagagggagacacgttaagtgtaaaccatttacgtcgattcttaaaaggtgtccatctttgttatccgttgatttaattaaaagtataagctggatggcaaattgccagaatgttaagtccagggtgtgatttcgaccgtctttcccatcgattcttttttgcgccatctcccccgcttagcaggcaaactactttcctccacggccgctgcgcggtagtctcagagcagacgcaacggtaaaagcgtctcattccaataacaatgaagtacgtgactgacaggacagggtatggattcaacaataagcgtgcagcccggcgaggcgccagattcactacatcgggcccggcgggcggcctggggtagttttgccggcgcggtggtcgactggtacgattttcttctctatggcattaccgccgcgctggtgttcaaccgcgaatttttcccgcaaatcggcccggcgatgggaacgcttgccgcctttgccaccttcggcgttgggtttctttttcgcccgctcggcggaattatttttggccacttcggcgatcgcctcgggcggaaacggatgctgatgatgaccgtctggatgatgggtatcgccactgcctgcatcggcctgctcccctcgttcaaccagatcggctggtgggcgccggtgctgctggtgttcctgcgagcggttcagggattcgccgtcggcggcgaatggggcggcgcggcgctgctctcggtggagaatgccccacaggggaaaaaagccttttacagcagcggggtgcaggtgggctacggcgtcggcctcctgctctctaccgggctggtatcgctgattagcagcctgaccagcgaccagcagttcctcagctggggctggcgcgtaccgttcctgttcagcgtggtgctggtccttattgcgctgtggatccgtaacggcatggcggaatcgcaggagtttgaagcgcagcagagccaggacaacgcgccgcagatgaaaaagcggctaccggtagtggaagcgctgcttcgccatccgggagcgtttttactgattatcgccctgcggctgtgtgaactgctgacgatgtatatcgtcaccgccttcgccctcaactactccacgcaaaacctcggcctgccgcgcgagctgtttctcaacattggcctgctggtgggcggtcttagctgcctgactatcccctgtttcgcctggctggcagaccgctttggccgtcggcggatctatatcaccggggcgctgatcggcactttgagcggtttcccgttctttatggcgctggagagtcagtccgttttctggatcctgttcttcgccctgatgctggccaatatcgcccatgatatggtggtctgcgtccagcagccgatgtttaccgagctgttcggcgccagctatcgctatagcggcgccggcgtcggctaccaggtggcgagcgtggtcggcggcggctttaccccgtttattgccgcggcgctggtcaccttctccggcggatcgtggcacagcgtggccctctatctgaccgcaggatgcctgctgtcagcgctcaccgcgctgatgatgaaaaagcaccccgtcgactgacccaccagcggagggcgtaacccgcgccctccggtaaggagaatgcatgtctcagttaaccctggccgactgctggcctcgccgtttttccccctcttcgctggcgctgcagttttgcgaggatcccacccaggcggaacagccgctgtttgccaaagccagcgccggcgaggccgtcgcccagctctggcaggcgccgcagggattggtggtgccggggagctatcgtcagtttacggatctgccggcggtcagcgcgcattttgccgcgcgcggctggccggtatggcttcgccgctccggcggcggtctggtgccccaggggccgggcattatcaaccttagcctcgcctggccggtgcagcagccgctcggcgaagccgccgaaccgatctatcattcgctgtgcgcggtgctgcagcgtaccctcgcgcgcttcggcgttgccagccacccccgggcggtaaacggttccttttgcgatggccggtataacctcgcctgcggggagggcgaggcggcgcgcaagattgtcggtaccgcccagtactggcggccgctgacggcaggccgcggccacgtggtgctggcccatgcggtgatccttattgacgccgatctgagcgcggcgcatcaggcggcgaacgccttcgaagcgcagctcggcagcgagcgggtctattgcgctgacaagaccgttactctcgcgcagctgcttcccggcgagcgccatctgctgccccgctttagcgagacgctggcgcaggagctggacgcggctcgctgaaggtcgctttcaggtagcggctgaaggtttccaccgcgcgcgacacgcgcggagtatagggccgaatgacgtatagccggtcggcaaacacctccaccggctgccacgccggcagcagctcctgcaccagcccgcggccaatggcctcccgggcgctgaaatccggcaacagcgccaccccaagccccgccagcaccgcatcacgtagcgactcgctgttattggtggcgaatggcccctgcacgttgatggtcacccgagcatcgggcgactgacgggaggcgaacgtccactgcgggcgctgtggcccacggggataggtcaggcactggtggtggcgcagatcttcgggggtctccgggcggccatggcggcgaatatagtctgcggacgcgacggtaagcgtcgcggtgtgacacagcggccaggcgacgtgggtatcggggagcgcctcgcgccgacagtggcggatggcgagatcgaacccttcgctggccagagagaccagccggtcggtgacctcaagctgcagatgcagctggggatgctgatgcaaaaaaggcgcgattgccgggaccagctgctggcgggaaaaggccaccggcgcggtcaggcgcagcgttccccgcagcggcccgccctcatcgcaggcgccggtgaaaatatcccgcagctgaccaaacggctcgttgagctccgccaccagccgcagtccgtcgtcgctgaggctcacgctgcgggtggtgcgatggacgagggttttaccggtcacccgctccagctcgctgattttctggctgatagccgacttgctgatccccagcttttccgcggcccgggtatagcttttttgttcttccagcaccgtcagccagtacagatggggccagtaactctccggacgactctcgctcatgtgattgttcaccagtaaaaacaatgtattcaactatagcggtttttgccgacggcggcatcggctagcatcttgttgagcccatcattattccctaacgataaggagcacctgcatgccattactgacatttgacctgattgaaggccgtacggaacaggaggtcaaaaccctgctggatgccgcccatcgcgccgtgctacgcgccttcgaggtaccagaacgcgaccgttaccagattgttcatgaaaacaaagcccaccatatggtgattgaagataccggcctcggtctgacccgcacgcgggatctggtggtggtgcgggtctataccagcccgcgcagcgaggcgcagaagcagcgcttcttcgccattttgcaggaggagctggcggaacactgcggcctgagcggcgatgacctgatggtgtcgattatcagtaaccagaaaggcgactggagctttggccgcggggtcgcgcagtatcttaccggcgatctgtaacccgcagcccgcagtacgcccttagcggcgggctgccgtcgcgatacgctgccgcgcctgctgctcgatattctccagcaactcctggacatcgtcttcatcaatgtcgaggaactggccttccagcagcgcggcgtgaatatcttcccgggtgaccgaaatacccagcggcaccgccctggatttgacctcctccgccgccagcggatgcggataacggcggccaaccaggttattaaacacaatagccagcagcgccagcatcagcgagttgaggagcaccggggtcagcacaaagtgatagccttcgctgtgcaccccggcgccgccgaggatcgccgtcagggccaccgcgccgccggggggatgcagacagcgcagaaaatacatcccggcgatggccagagccgccgccagaccgcaggccagcgccgcatcggggaccagcatacccaccgtgacgccgatcagcgccgacagcacgttgccgccgacaatcgaccacggctgcgccagcgggctgctcggtacgccaaacaggagtaccgccgaggcccccatcggggcaataaaccacagattgacttcgccgagcagccagtggctgaacatgctggtcaccgccagtccggtgccggcgccaatggatcccagcacgatatgccggcgggccaccggcagcgcgtgcggcttcaggcggccaaggaaaatccgcagccgtgaaaatatccccgcaggaataacactcaacatcgcttcatcgctcaaatcataggaattacttatattttattttctttttttaaccttaaattaacaaccctgtctttcgcaggggatagcgcgggcggcgatgtccgacggcattgtgctgtgaattctcgcgggggctgatagaatcccttttcggtcagggggataccccttttgcgaattgaaggtcataacccagtgaataataaaatctctttagcgaaagaagtggcatgggccagccagaatatgccgcgtaccctgcgtcaggtcgccgcgctgcccgacctcagcggcgtgcgtctggcctgctgtatgcacctcgacatgaaaatgatcccgctggtgcaggggatcctcgacaagggcgctcaggtctttttaaccacctgtaaccccaccaccgtgcaggacgacgtggtggcctggctggtggagcgcggcgccgaggcctgcgcgtggcgcaatatgagcgatgccgactggcaacagtcatgggaaaaagcgattgcctggcagcccactcacctgtgcgagatgggcgccgatatcaccaccctgctccaccagcgcggcgagtttgggaacatcgtggcgggtctggaagccaccggctcgggcgtcaatcggctgggggatattcagccaggctatccgatctttaactgggacgatctgccggtcaaagagggactgcacaaccgccatatggtcggtctcaccgcctggcacaccttcttccagaccactcacctcactctgcatgagaaaaaagtgctggtgatcggctacggcctggtcggccagggcgtcgcggcggcggcaaaagcttttggcggtcaggtgatggtggcggagatcgatcctgcccgccgtctgcaggcggcctacgacggctggcacgtggtggacctccaggaggcaatcgcctcggcggacgtggtggccacagcgacaggcggtaaaaacgtggttaatcgccaggcgctggaccgggcgaaagcgggagtatttatccttaacgtcggccacgtggcggaagagatcgacggcgagtacctgcgccagtacccccaggaagaggtgatgccgtatatcaacgcctaccgcatggccgacaaaaccgtctatctgctggccaatggttcaatgctcaatctgaccgctggcttcggcgacagcctgaacgcctttgacgtcaccctcgcggtgatggccagcggcatccgccatattgtcaccgacggcatgcgcgccccggcgaaggtttatctcctgccccaggcggtctggcagcaggccctgtaaacccggcgcatcgcccccatcgcgggacgatgcgctttaccatcaggacgacggcgcgctatcgggcaacacaatattgctctgcgccagcgttcccatctggttgtacatcacgctggcggcatccagcaggtgcatcgccagcgcggcaccgctgccctctcccaggcgcatgtccatatcgagatacggccgcagacccagcgcgtcgagggcgatctgcgctcctttctccgccgacaggtgtgaaggaataagataagggtgcgccgacggggccatgcggcaggcggccagggcagaggcataggagaggaagccatccagcaccaccggcaggccacaggaggccgccccgaggatcaccccggtcatgcccaccagatcgtaaccccccaccttcgccaggacatccagcccgtcggccgggttcggctgattatgggctatcgcctggcgcaccaccgccaccttatggccccgctgcgccagcggcagattggccccacagcccaccaccgcgtcagggtcgctgcccgtcaggacactgatcgtcgctgcggccggggtggtattggccattcccaattcgccgacgccgaaggctttcaccccgtcggcagcgagctggcgggtgagatgcatgctggccagcagcaccgtctccgcctgctggcggctcatggccgccgtccgggcgatattcccgctaccgcgggccaccttgaggttaatcaggcccggcagcgggtcggcatcgatgccgacatccaccacctgcaccctggccccggcctgcgccgccagcacgcagacgccggtgttgccccgcaccatattgccggcatgaatggccgtcaccccctgcggcgaaggggtcacgccttcatgccagacgccatggtcggcgcacatgaccacaatcgctttctccgccagcgccagctgcccctgcaagccaggcagaccggccagctgcaccgccagcgtctccagacggccaaggctgccgggcggctttaacaggccatcaatatgctgctgagcgcgcgccatgcccgtcacatcgggctgcggaatggcagccagtaacgccgaaagtgtttccattctgttcctcaccgttggtgtcaggccttacagcagcgccagtaaaaagagtaattcgcccagctcaatcgccgccccgagggtatccccggtctgcccgccgagggttcgcttcagcgcccatcccagaccccagatcagcaccagggtgatcagcgcggcgcgcagcccctgcagccccagcagggcggtggccagcgcgatcgccatcgccatcgtcaccagcgtctgctgcaggctaattttgccgataaacagattgcccagccccttttcccgcgcatagcgatgacgatacatcagcagcgccgccatcccgcgaccgacggcgcaggccgccgccagggctgcgatggggtggatatcacgcagcagcagctcgccaaccaccagcactttcgccaccagcacaaagatcagcgccagcccgccgtgggtgcccagccggctgtcgcgcatgatctccagcatccgatcgcgggtgcgggcggagaaaatgccgtcgcaggtatcagccagcccgtcaaggtggaatccgccggtgagcagcgccagcgccagcacgccgaaaagcgccgccagcgggacgccgcaccatggctgcaggaggagcgccaccgcgccggcgatggcgccgagcagtaaaccgaccagcggaaaggtgacgatactgcgctggtactgttcgatctccaggccctgagataaccgcgccgggaccggcaggcggctgataaacgagagtgcagcaaagaatgacttaatcacgtgaggttgactcctgtcggcgaaagcagcggaagagttctgtcgcgcccggtcagcacctgagtttgtcttctggcgaatcgatcgtcggagaggtgagaggtgttgagatatcgccctgacgccgctgcgtcagatgcccggccaggatgagagaaacctttccgatatcaatacgtttttcgcgggccagtatagcaaagtgtcggtgaggagaggcagttgccggaacaaagttttcgcagaaaaaagcagggaagagagggaaacgcggaacagcccggcgacgcttaacgccgccggaccggcagggtttagccttcgactttggcttcgcccatcactttcagttttttcgagatgtcgcggcgctctttagacagctcggcatttttgatgatgtaatcatcaacgcgatcttcgtaatcgctcttcatgctggcgatgatgccctggatggcttccacgctcatgcccggtttgatgtagtcgctgaggttgtccagcagcagaacgcgcttctggttatcacggatctttttctcaacgtcctgaatttcacgctgcagtttgttcttacgacggtacagacgaacaaactccagtacgtcctggaaagaaggcttagttgtttccatttttacacccctaataattgagattcggattcgtaaagcgactgcgttatagggctaacataactgctagcagccgctgatgacaatgttttttcctttgcgtttatcataaccctaaacgctgctgaatcgaaacaacccatgtggttacccggtgcatctggtgtttatttgcgcaacgcgcggcagatcagatgcgagagcagctccagctggcgcgccagttcgattgagagccaaacatagccatggaccggggtttccgccaggccgtcatcaccctgctctttcagcagctggcgcagttcgaggacgatctcagtcagcttttcattgttggcgcgcacaggctgagggttcccttcgtacagcgcgtgggcgatggacaacagcgtctgctgggtcatctgctgcgtctcccgcagggtgtgcgcattgagcatcacgaagtgacccggacgcgttgcccaccaggcgttgatctgcagctccagcatgcagacgaggttgcggctgacggtctggatagcctcgaagatcgccttctggatgtgcgtctctttgctggcgggggtgatcagcccgcgcattttaaccacgtcgttcagcgcctgctggagatgcttttccagccgcggtcgatccaccagatttggcgagaagccggcctggtagaggcggttaaagttggtgacatagctggccatctggatgcgccagtggatgaacgcccgctgcggccagatgccggtaaacagcatcgccagcagcgagccgaagatcacgtcgccgcttcgccacagcgcggtatgcatatcgccgggcggcgccccgaccaccaccgacagagtaatgccgatcagcagcgcctgatagggtttcttgcccagcgccagccagccgcagaggaacatcgccgccgcgcaccagaggaccatcagcggcagggagatgagctcaagcttcagcgccaccagccccagcgccgaaccgaggatcgtgccgccgatacgctgaaacgcccgcggcacgacgttaccccagaaggagatcggccccatcaccaccaccagagtgatgagaggccaggttccctcaggcacgttcagcagccgcaccagcaaaaaagtgagcacaaaggccagcgcaatccgcacaccatgcaccacccgataatggcgatacaagcggatctcaaatggcttgagtgatttatcagcgcgcacaaccctctccggcaaaacgaaaaggccaattgtaactgctttttcgcccggagcatgccgggaatgtaaaaaaccttgtccggaacaggggtaaactgctacgacgcgacgcgctcaacgggaacatacatgtcgatatcccagtagccgtcgtggttgccgtcgttaagatagacctcaaagcagggctggggggcgatgcgatacgccgtgctctgctgcaggctgtcgaaaaactgcatccacggagtggcgaagtcgtaatccaccacccgcgcgcgggcgcaggcgtaatccccgccggcaatcgccgccagaatcaccccttcgctgttggcgggaatgacataatcctcatccacggcgaccgctgtcgcgcagcgcagtttttccgccggcacttcctccgggttatcgtagtagacggccacccattcgcgggcgggcacctggtggttctcaacccacatcatcagttgctcaaacccctgcttgaccgtgtgatcccagggcccgaccagatggaaaccggcgatggttttcttgccgagggtggtgatgctgtagttcattttgcctcctttggagataaattactgtatgaatatacagctaatttaacaggagatcccccttcagtatgtgcgcgaattcacagagtcgccaccacactgctgtaaaaacaggcgccccgccagcacgagcgacaggcgaaaaaaaaccgcctgcaaagaggcggttggcgtggttacagctcgtgatgcaggtaatcgctcattcgcgagaacactccgcctttattgatgctttcgagggtgaccagcggatagtgccccaccaccttgtcgccgtcatacagtgaaatctcgccaacccgctgattggcggcgatcggcgcctcaaggtccttcttatccagcacatatttcgctttaatgcgcgacacttccgccttcggcagggctaaccagaaatcctgatcggtgccgagcttaatctgctctttatcgccgtaccagatacgctcggtgccgaccttctgccccttctgcagcacctgcacggtgtcgaagttctgctgcccccagtgcagcagtttagcggcctgctgctcgcggcctttcggactgtccgcccccatcaccacggcgatcagccggcgctggccatccaccgccgaggcgatcaggttgaacccggcccccgaggtgtggccggttttcaggccatcgacgttcatggttttatcccacagcagaccgttacggttttgctgggtgatcccgttccacgtcaggcttttctggctgtacatgtggtagacgtctggttcgccatgaataatcgcccgcgagagcaccgcgaggtcataggccgaactgtgctggcccggggcgtcgaggccgtggacggtttcgaaatgggtgtcccgcaggtgcagtttttcgacatactgattcatcagggcgacaaactgcggctggccgccggcgacatagtcggccagcgcgacgcaggcgtcgttaccggagtcgacaatcagcccacggctgaggtcgcggacgctgacgcgatcccctggctttaagaacatcagcgatgatccgtcgaacaccgggttgcccttcgcccaggcgtctttacccacggtgacgatatcgtcaaaggtgatacgatggctgtcgatggcgcgatcgaccacgtagccggtcatcagtttggtcagactggcaggattacgctgctgatgttcgttacccgcggtcaggacctgaccggtggtgtaatccatcagcacccaggagccagcctgaatggaaggcggcgcgaccgtagcaggtaagtcgacggcaaatgcgcaggaaacgctcgaagcgagcaaagatacagcaataaacaaacggcctttcaacggcatatcctctagatttacagatccgccgtcctttttacggaacttcgcgtttcatatcagggtttaattgcaagaaaatatgacacagcagaggaagttgcttgccgcgacccttctgatgaccgggcaaatcgtttaccataccggtcgcacgccaccacggataatgaacagactatgcaagatagcgtcaaccagcccggatttttattccacgattatgaaaccttcggcaccagcccttccctcgaccggccggcgcagttcgccgccatccgcaccgacgcggagctgaatgtgctcggcgagcccgaagtgttttactgcaaacccgctgacgattacctgccgcagccgcaggcggtgatgatcaccgggatcacgccgcaggaagcgctggccaaaggggataatgaggccacatttgcccgccgcatccacgatctgttcacggtgccgcaaacctgtatcgtcggctataacaacgtgcgctttgatgacgaagtgacgcggaatatcttctatcgcaacttctatgacccttatgcctggagctggcagcacgataactcgcgctgggatctgctcgacgtgatgcgcgcctgctatgccctgcgccctgaagggatcgcctggccggagaatgacgaagggttgccgagcttccggcttgaacatctgaccgtcgccaacggtattgaacaccagaacgcccatgacgcgatggccgacgtatacgccaccatcgccatggcgaagctggtgaaaacccggcagccgcggctgtttgattatctctacagccaccgcaataagcgcaagctggcgacgcttatcgacgtgccgcagatgaagcccctggtgcatgtctccggcatgtttggcgccgcgcgcggcaacaccagcctggtggcgcccctggcctggcatccggaaaaccgcaatgcggtgattatggtcgatctggcgggcgatatggcgccactgctggaactggatgccgatgccctgcgcgagcggctttacaccccgcgcgccgagcttggcgatctgccggcggcgccgatcaagctggtgcatttaaataaatgtccggtactggcccaggccaataccctgcgcccgcaggatgccgaccggctggggatctccattcagcgctgtctggagaacgcccagctgctgcgggcgaatccgcaggtgcgcgagaaggtagtggcggtctatgccgaagccgaacccttcgtgccgtccgaaaacgtcgacgcccagctgtacaatgggttctttagcgatgccgaccgcgcggcgatgaaaatcgtgctggaaaccgaaccgcgcaatctgccggcgctggatatcaccttcgccgaccagcgtatcgaacgcctgctgtttaactaccgggcgcgcaacttccccggcacgctcgatgaacatgagcagcagcgctggttagagcatcgtcgtcaggtgtttacgccggcttttttgcaggcctatgccgatgagctgcagatactgtatcaacagtatgcggatgataaagagaagctggcgcagctgaaggcgctgtggcagtacgcacaggatattgtctgattggctgaaattcccgggttgcggctaacgccttacccgggctacaaacgatgaccggggaggacgcctgaccgtaggcccgcgcaagtgcagcgccgccgggcattgcgtccccagttcgtgcttacctttttgcccggtggcggcttcgccttaccgggcctgggcgctggtaccagagtagcccgggtaagacgcctcgcgtcgcacccgggaacgttgcttagattttcgcgcggctggcgatgatttcatccgccacattacgcggcgcttccgcgtaatggtggaactccatgctgtaggttgcccgtccctgcgacatcgagcgcagcgtggtggaataaccaaacatctccgccagcggcacgtcggcgcggatgatctggctgccgaagcgctcttccatcccctgcaccatcccgcgacgggaagagagatcgcccataatattcccggcgtactcttccggcgtctccacctcgacgtgcatcactggctcaaggatcaccggatccgctttgcgcgcgccctcccggaagccaaagatcgccgccatgcggaacgccatctccgaggagtccacgtcgtggtacgacccaaaggtcagggtcgctttcacgtcaaccaccggataacccgccagcacgccggtgcccatcgcttcgcgcagccctttctccacggaagggatgtactcgcgcggcaccacgccgcctttggtggcgtcctcgaagacgaaaccgctgcccggcgccagcggctccagggtcagcacaacgtgcccgtactgccctttgccgccggactggcgcacaaatttgccttccacgtccgtcactttcttgcgcagggtttcgcggtaggtgacctgcggacggccaatgttggcctcgacgccaaactcgcgcttcatccggtcgacaatgatctccagatgcagctcacccatgccggagataatcgtctggccggactcttcatcggtatgcagacggaacgacggatcttccgccgccagccgctgcagcgcgatgcccattttctcctggtccgctttggtcttcggctcaatcgccagcgaaatcaccggctccggaaactccatccgttcgagggtaatcaccgcatccggatcgcataacgtatcgccggtggtcacatccttcagaccgacgcaggccgcgatatccccggcgtgcagttcgtcaacttcgtgacggtcgttggcctgcatcagcacgatacgcccgatgcgctctttcttacccttcaccgggttccacaccgcatcgcctttcttcagcgtcccggagtagacgcggataaaggtcagctggccgacgtaggggtcggtcatcagtttgaacgccagcgccgacagcggctcatcgtcgctcggatggcgttccgccggctggccttgctcatcaacgccctgtatcgccggaatatccagcggcgacggcatcagctccaccaccgcatcgagcatgcgctgcacgcctttgtttttaaaggcgctcccgcagagcaccgcctggatctcccccttcaccgtgcgctggcgcagaccggcgacgatctccgcctcgtccagctcaccggtttccaggtatttatccatcagctcatcgctggcttccgccgccgccgagaccattttctcccgccactgctgcgccgtcgccagcagatcgtcagggactggcccatagctaaaggtcatgccctgggtggcgtcatcccacaggatggcgcgcattttcaccaggtcgacgacgccggtgaaatgctcttcagcgccaatggggatcacaatcggcaccgggttagccttcaggcggtcgatcatcatctgcaccacgcggaagaagtccgcgccggggcggtccatcttgttgacgaaggccagccgcggaacgtggtatttattcgcctggcgccagacggtttccgactggggctgcaccccgccgacggagtcgtacaccatcaccgcgccgtcgagcacgcgcatggaacgttccacctcaatggtgaaatccacgtgccccggggtgtcgatgatattgatccggtgcggctcgaagctgcggtccatccccggccagaagcagcttaccgccgccgaggtaatggtgatcccgcgctcttgctcctgcgccatccagtcggtggttgccgcgccatcgtgtacttcacccagcttatggctcatcccggtataaaacaggatgcgctcggtggtggtggttttaccggcatcgatatgcgcggagataccgatgttgcgataacgttcgagagggatgggtcggggcatgatgcgtccttagtcgttttgacggtcagtctgcggtcggaatgatccgcagttcatttaactgcgtctatcttagtacaactgtacgagtatattcgaactatttttgctatcattacgattgggcaggttgcggcggcgcgcgtggtatcagaaccggagtttgggtatagtagccgccagccgccgatatgggctgcggctgccatgcgccgcgccaccgccgacacaggattattatgatcgccaatcaccccgaacgagaacaaattcgcctggaaaatgtcctttccgcgctcggaaacccgctgcgactggagatcattcgtacgctggccgacggcagcgagctgagctgcaacgccctgcgccaggaggaggtggccaagtccaccatgacccaccactggcgcgtcctgcgcgacagcggtgtgatctggcaacggcctcagggacgggagaatatgatttcgctgcgccgggaagatctggacgcccgttttcccggcctgctggatacgctgctgaaagttatggtgcaggcaggataagctcttctgccgggtggcggctgcgcctgacccggcctacggcggcctcccgtcagcttatgtcccccaggcccggcaagcgccgccctgcaaaaaaatcagacctcgatgtcgaaccggcgcagacaaaaaaaagccggaggtttccctccggcttttattatttacatcacgctatgccttaggccacatcttcgtactgcggcaccgggttgcggaagcttttggtcacgcaggccagatagaccagaccgataccggcccagatcaggcccagaatcatcgagctctcttccaggttgacccacagcgcgccaacggtcagggcgccgcacatcggcaggaacagatactggaagtggtctttcagcgtcttgttgcgcttctcacggatccagaactgggaaatcaccgacaggttaacgaaggtaaacgccaccagcgcaccaaagttaatcagcgccgtcgccatcaccaggtcgaagttaatcgccagcagcgcaatcgcgccgaccaggatgatgttcatcgccggagtgcgccaggtcgggtgcacgtagccgaagaagcttttcgggaacacgccgtcgcggcccataacgtacatcagacgcgccacgccagcgtgcgccgccataccggacgccagtacggtgatggtggagaagatcagcgcgccaacctggaaggctttacctgccacgtagagcataatttccggctgtgacgcatccggatctttaaagcgcgagatatccgggaagtacagctgcaggaagtaggtggcaaagatgaagatcaggccgccgatcagcgcggtcaggaagatcgcgcgcggaatgacgcgctctgcatctttggtctcttcagacaggttgctgatgccatcgaaaccggtaaacgagaagcacaggatcgtcgccccggtaatcatcgggatcacgtgagcgtcaccggaccagaacggacggctgctggccagcgtaccggcgccctcgccttcaaacacgccataaatcaccatgccgaggataacggcgatcagcaccacctgcagcaccacgatcacggtgttgaagttggccacggatttaatgctgcgcaggttaaaggcggtcataaaggcgaccagcgcgataacaaacacccacgacggaatcgaaggcaccagcgcttcaaaatagattttcgccagcagaatgttgatcatcggcgcgaacaggtagtcgagcagcgaggaccaacccaccataaagccaacggtcgggctgatggatttctgcgcataggtatacgccgagccggcagaagggtaacgacgtaccagcttgccatagctcagagcagtaaacaggatagcgattaacgcaaaggcgtaggccgtcggcacgtgaccgtcggtcataccagagacgataccaaacgtatcgaacagcgtcatcggctgcatataggccaggcccatcattacaaccggaactaacgtaagcgttttacgtaattccacgcgagaggtatttggagtagcgttatgcgacatagttatccccttttacggtgaacgccagcgcgtaagcaaaaaattgccccatttctttctattcctcagcgacaacgactgtcggtttttagtaaatatctatccggtacgaagcccggcctcttggtattgaatgatgtgtctttcgaccaaaaaaataaccgacactttaaaaaaaagcgtcggctagtctctggttttcaggccgcatattttgcaacaaattcaatggcgttgacaagatgttatgaagttcattgcgtaagcataatttttaacgtgctaatatctatacggtttccgtatgataaattgtaaaaatagcactatttgctaatagcgtttcccgccaccatttgccagccaaaccgcaggtggcgtcattccaggcaatccatgcgcgttgacgaggagatagcccgcgcacggtcatgcagaccagctcgccgctgtccagcagaccctgcacctgatagcgcggcaggcacccccagcccagccccaggcgcagcagcgccagctgccccgcggcgtcacacaccgtcagggtctcctgatcgctgagtagcgccccgccctcgccggtggccaccgcccggtaacggcgcagggttcgccagctcaacggtgcgcggtgtcgcgccagcggatgctgtggggcaacgaccagcagcagctccagctcgccgagggggagatagtcataaccgctcagcggcggcggctcgccgagcgcccccagcagcagatcggcctgcccgtcagtcagcggccgccagtccagcagggaggggttcagcgtgaagtgcagccgggtcagcggctgttgttgataaaatgcagcgattggcggcgagagcagcgccacgggaaaggtgctgtccacagccagacgaaggctattttcccacccctgctgcagcttaaccgcccggatctccagttcgcgggcgatatgcagcacctcccgccctttctccagcagcatctgtccgctgggggtaaagcgcgcgcgatggccgctgcggtcgagcagctgaatattgagatcgctttccaggcggtgaatggtgtagctcagcgccgagggcgttttaaagagctttgccgacgcggcggcaaagctcccctctttttccagagcatccaggatcacgaggacatccagcagtggtttcatcgctacccccttacggtatgcgaatcaccgctggcggatcactccatcggcatcaccagcggatcggggtactggtactcaaaccccagctcattgcagatacgattgccatccacaatcttgccctggccgccgtccgggctgtcgctgaacaccggcggcggcagaccgagctcgcgggccatctgcggataaaagaggccgcgcgccggatggcggggcgcacatagattatagatgtgcccgcccttcggggcctgcagcagcagttcgatagcggccaccacatcctgcaaatgcaccagattgaccacgtgctggccatccggcgccgacttgccggcaaaaaaacgccccggatggcgggaaggccccaccagcccggccaggcgcagaatatccaccgatgtccccggcaggttgtgcagccagtcctccagctccttgagcacctgtccgctggcggtttgcggcagacgcggggaattctccttcaccgtaccgttgacgttgccatacaccgaggtggagctggtgaagacgatccgcggaatatggtacgccagcgcggtatcgacgatctcctgcaccgcctgtagataaaacccttcccctgccccggtacgccgggccggcagggtgatcaccagcgcatcgacgttcatcagcgcgtcgaggtcctcggtatcacagaccagctgcggctccaggcgcagcggatagctgtcgatcccgcacatccgcgccgcctccacgccatcctgcgtagttttactgccggtgacctgccagcctcgcgccgtcaacgacagcgccagcggcatccccagccatcccaaaccgactatcgcgacctttttcatcccaggctcctgactctttcgctgtgctgattacaggctacgccagccagcggcaactgacaatttcttcgctcaatatgaaatgaattaatgatagaaaaaagcccttgctttctgcggcggaagtggtttaggttaaaggacatcaaatgcatagtcattcacagagaatttttatgaaccgcgttcaatttaaacaccaccatcatcaccatcatcctgactagtctttcaggcgatgtgtgctggaagacgtttggatcttccagtggtgcatgaacgcgcagagagcccccggaagattcacttccgggggcttttttttggaccaaattcggacagattcagacaggtattcagaggaaaagaacaatgttagacaacacccgtttacgcatagctattcagaaatcaggccgtttaagcgaagattcacgcgaattactcagccgctgcggcattaaagtcaatttgcacacccagcgtctgattgcgctggcggaaaatatgccaatcgatattctgcgcgtgcgtgatgacgatatcccgggcctggtgatggacggtgttgtcgacctcggcattatcggcgaaaacgtgctggaagaagaactgctcagccgccgcgcccagggcgaagacccgcgctacttcaccctgcgccgtctcgacttcggcggctgccgcctgtcgctggcgactccggtggatgaagcctggaacggcccggcggcgctggacggcaaacgtatcgccacctcttatccgcacctgctgaagcgctacctcgatcaaaaaggtatctcctttaagtcctgtttgctgaacggctccgtggaagtggcgccgcgcgccggcctcgccgacgctatctgcgacctcgtctccaccggcgccactctggaagctaacggcctgcgcgaagtggaagtgatctaccgctccaaagcttgtctgatccagcgcgacggtgaaatggccgacgccaaacagcagctgattgaccgcctgctgacccgtattcagggcgtgattcaggcccgcgagtcgaaatacatcatgatgcacgccccgaccgaacgcctggaagaagtggttgccctgctgccgggcgccgagcggccgactattctgccgctggcaggcgacaagcagcgcgtggcgatgcacatggtcagcagcgaaaccctgttctgggagaccatggaaaaactgaaggcgctgggcgccagctccattctggtgctgccgattgagaaaatgatggagtaatcggccagccggtcacgggacacacaggggaatacaatcatgagcttcaacacaatcatcgactggaacggctgtagcgcagaccaacaacagcaactcttaacgcgcccggcgatttccgcctccgacagcatcagtaaaacggtgacggagatcctgaataacgtcaaagccaacggcgacgcggcgctgcgcgaatacagcgcgaagtttgataaaaccaccgtcgccgcgctgcaggtgagcgaggcggagatcgccgccgccggcgagcgcctcagcgatgagctgaagcaggcgatggcggtggcagtgaaaaacatcgagaccttccacaacgcgcaacagctgcaggcggtggatgtcgaaacgctgccgggggtgcgctgccagcaggtcacccgtcctatcgcctccgtcggactgtacattcccggcggctcagcgccgctgttctccacggtgctgatgctggcgacgccggcgcgcatcgccggctgtcagcaggtggtgctctgctcgccgccgccgattgccgatgagatcctctatgccgcgcagctgtgcggcgtaaaaaccatctttaacgtcggcggcgcccaggccatcgccgccctcgccctcggtaccgagtcggtgccgaaggtggataaaatctttggcccgggcaacgcttacgtcacggaagccaaacgccaggtcagccagcgtctggacggcgcagctatcgacatgccggccggcccgtcggaagtgctggtcatcgccgacagcggcgccaacccggactttgtcgcctccgacctgctgtcgcaggcggaacacggcccggactcgcaggtgatcctcctgaccccggacgccgacatgggcagccgcgtcgccgaagccgtggagcgccagctggccgcccttccgcgcgccgaaactgcccgcgtggcgctctccgccagccggatcatcgtggcccgcgatctggcgcagtgcgtggctatctccaaccagtacggcccggagcacttgatcattcagacccgtcaggcccgcgagctggtggacagcatcaccagcgccggttccgttttccttggcgactggtcaccggaatccgcgggcgactacgcctcgggcaccaaccacgtcctgccgacctatggttacaccgccacctgctcaagcctcggcctggccgacttccagaagcggatgaccgtgcaggagctgtcgcgcgacggctttgccgccctcgcctcaacgattgagatcctggccgccgccgagcgccttgacgcccacaaaaacgccgtaacgctgcgcgttgccgccctgaaggagcaagcatgagcattgaagatttagcccgcgccaacgtccgcgcgctgaccccgtatcaatccgctcgccggctgggcggcaaaggcgacgtctggctcaacgccaacgaattccctaccgccgtagccttccagcttaccgaacagacgctgaaccgctatccggagccgcagccgaaggccgtgattgagagctacgcccgctacgccgaggtcaaaccggagcaggtgctggtcagccgcggcgccgacgaaggcatcgagctgctgatccgcgccttctgtgagcccggcgaagacgcggtgctctactgcccgccgacctacggcatgtacagcgtcagcgccgagaccatcggggtcgaatgccgcaccgtgccgacgctggccgactggcagctcgacctgccgggcatcgaggcgcggctggacggcgtgaaggtggtcttcgtctgcagcccgaacaacccgaccgggcagattatcgacccgcagtcgatgcgcgacctgctggagatgacccgcggcaaagccatcgtggtggccgacgaagcctatattgaattctgcccgcaggcgacgctcgccggctggctcagcgactatccgcacctggtggtgctgcgcacgctgtccaaagccttcgccctcgccggcctgcgctgcggcttcaccctcgccaacgccgaggtgatcaacgtgctgctgaaagtgatcgccccgtacccgctctccacgccggtggccgatatcgccgcccaggccctgagcccggaggggatcgccgcgatgcgccagcgcgtggcgcagatccttgacgagcgccgctacctggtggaacagctgcgcggcatcgcctgcgtggagcaggtcttcgattccgagaccaactatgtgctggcgcggataaccgcctccagcgcagtgtttaaatctttgtgggatcagggcattatcttacgtgaccagaataaacaaccttcattaagcggctgtttgcgtatcactatcggtacccgtgccgagagccagcgcgtgattgacgccttgactgcggagaatgtatgacccagaagtatctctttattgaccgtgacggcacactgatttccgaaccgccggaggatttccaggtggaccggttcgacaagctggcgtttgagccgcaggtgatcccggcgctgctgaagctgcagcaggaaggctataagctggtgatgatcaccaatcaggatggcctgggaaccgacagtctgccgcaggaagcgtttgatggcccgcacaacctgatgatgcagatcttcgcctcgcagggcgttaactttgaagaggtgctgatttgtccgcacttcccgggcgacaactgcgcctgccgcaagccaaaaacgcagctggtgctgccgtggctggaagagggcgtgctggataaatcccacagctatgtgattggcgaccgggccaccgaccttgagctggcggataacatgggaattaccggtctgcgctatgaccgcgagacgctcgactggccgaccatctgcgagcagctgacccgcagcgaccgctatgcccacgtcgagcgcatcaccaaagagacccaggtggatgtgaaagtgtggctggaccgcgaaggcggcagcaagatccataccggcgtcggcttttttgaccatatgctcgaccaaatcgccacccacggcggcttccgcatggaggttaacgtcggcggcgatctgtacatcgacgatcaccacacggtggaagataccggcctggccctcggcgaagccctgaagctggcccttggcgacaagcgcggcatcaatcgcttcggcttcgtgctgccgatggacgagtgtcttgcccgctgcgcgctggatatctccggccgtccgcacctggagtataaggcggacttcacctatcagcgcgtcggcgatctgagcaccgagatggtggaacacttcttccgctcgctctcctacaccatggcggtgaccctgcacctgaaaaccaagggcaagaacgatcaccaccgcgtggagagcctgttcaaagcctttggccgtacgctgcgccaggcgatccgcgtccagggcgatgccctgccgtcttccaaaggggtgctgtaatgaatgtggtgatccttgataccggctgcgccaacctcaattcggtgaaatcggcgattggccgccacggctatgagccagtggtcagccgcgatccggaagtggtattgcgtgccgataaactgtttcttcccggcgtcggcaccgcccaggcggcgatggatcagctgcgcgaccgggatctgatcgacctgatcaaagcctgtacccagccggtgctggggatttgcctgggcatgcagctgctcggcaagcgcagcgaggagaacaacggcgtcgatctgctgggcattatcgaagaagaggtgccgaagatgaccgaccacggtctgccgctgccgcacatgggctggaaccgggtgtatgccaaagctggcgatcggctgttccgcggcattgaagaaggcgcgtatttctacttcgtgcacagctacgccatgccggtcaacccgtacaccatcgcccagtgcaattacggcgaggcgttcaccgccgcggtgcagaaagataacttctttggcgtgcagtttcacccggagcgctccgggagcgccggggcgcagctgctgaaaaacttcctggagatgtgatgattattcctgctttagatttaatcgacggcaccgtcgttcgtctccatcagggcgattacggccagcagcgcgactatggcagcgatccgctgccgcgcctgcaggcctatgccgctcagggggcaaaagtcctgcacctggtcgacctgaccggggcgaaggatccggcgaagcgccagatcccgctgctgaaatcgctggtcgccggggttgacgtcccggtgcaggtcggcggcggcgtgcggaccgaagcggatgtcgcggccctgcttgaggccggcgtcgcccgcgtggtggtcggctccaccgcggtgaaatccccggaggaagtgaaaggctggttcaaacgctttggcccagaacggctggtgctcgccctcgacgtgcgtatcgacgccgacggcaataagcaggtggcggtcagcggctggcaggaaaactccggcgtgacgctggaggagctggtggaaagttatctgccggtcggcctgcagcacgtgctgtgcaccgatatctcccgcgacggcacgctggcaggctctaacgtctcgctgtacgaggaagtctgcgcccgctacccgcaggtggcgtttcagtcatccggcggcatcggcgatctcaaagatattgccgcgctgcgcggcaccggggtgcgcggcgtgattgttggccgcgcgctgctggaaggtaaattcaacgtaacggaggccattcaatgctggcaaaacggataatcccctgcctcgacgtccgcgacggccaggtagtgaaaggcgtgcagttccgtaatcacgagatcattggcgacatcgtcccgctggccaagcgctatgccgacgaaggggccgacgaactggtattctatgatatcaccgcctccagcgacggtcgggtggtcgacaagagctgggtgtcgcgggtagcggaagtgattgatattcctttctgcgtggcgggcgggatcaagtcgctggaagacgcggcgcagatcctctccttcggcgccgataagatctcgattaactcccctgctctcgccgacccgacgctgatcacccgccttgccgaccgctttggcgtgcagtgtatcgtggtggggattgatacctggtttgatgcagagaccggcaagtatcacgtcaaccagtataccggcgacgagagccgcacccgggtgacgcagtgggaaaccctcgactgggtggaggaagtgcagaagcgcggcgcaggcgagatcgttctcaatatgatgaaccaggacggggtgcgcaacggttacgacctgcagcagctggcgaaggttcgcgcggtgtgccacgtcccgctgatcgcctccggcggcgcgggcactatggaacacttcctcgaagccttccgcgacgccgacgttgacggcgcgctggcggcttcggtattccacaaacagattattaatattggcgaactgaaagcgtacctggcggcacagggcgtggagataagggtatgttgactgaacagctggactgggaaaaaacggacggcatgatgccggccatcgtgcagcacgccgtatccggcgaagtgctgatgcacggctacatgaacaaggaggcgctggagaaaaccgaagccaccggcaaggttaccttttactcgcgcaccaagcagcggctgtggaccaagggtgaaacctcgggccatgtcctcaatgtagtgagcatcacgccggactgtgacaacgatacgctgctggtgctggtgaacccgatcgggccgacctgccacaaaggcaccaccagctgcttcggcgaaaccggccaccagtggctgttcctctatcagctggagcagctgctggccgagcgtaaacacgccgacccggagagctcctatacggcgaagctgtatgccagcggcaccaagcgtattgcgcagaaagtgggggaagaaggcgtggagaccgcgctggccgccacggtgaacgaccgcttcgagctgaagaatgaggcgtcggacctgatgtaccacctgctggtgctgctgcaggaccaggggctggatctcggggaagtgattgataatctgaagagtcggcactgagaaaacttttttatgaactgaaactgattccgatttacattataccggtaagtaaataattatcatttcctttaagggcattcatcatatatgaatgcccttatcaaatactcatcattataaacaacattcatataagctgtttgcaacagtaaactatactttcaacacgcatttttgatttacgacacactttcagcgtaatcatagctgttttgatatgttgcacatggtctcatccccaatctcagctaaaatacatagcaatcatatataaaggtcagccaataaatatgaaacaaactattttcattttagcgatgagtatttttcctgttactgcattttctgaaagcacgctgatatcgccaatgattggaggtattgacatctgtcatgcctgcaatcaaaaatggaattatcaatacatatgaagcagcaaaatactgccagtcaataaatgaaacctcgtcctcacttatcgaaagaaaactatctgaatttggccctaaaaaaagtaaggatggtaaatttcagataggctatatgctaagtttcccattattatcttatgttaagatgcataatgatggctcgtatgagatcgacaaaggaataatacgctatcgtttaaaattactcccagacacaaaaagacaagctgttatttatcttttctcgaaccacttctccgtttccgagggtgcaaaaactgaagaattaatttctaaaatagatggcaaacacatgatgcaattaagcaatggcatagttcctgtcgacaactatttttccagcaaaacatatccatgggcaattaatgcaagcaactcattaagtgataagatacgcaaagacgcaattaatgaggttttatcgcaagtctgcgctttagatatagtagaccaacaaaaaattagagcagtgaccgtccctggtgaagttcattataccttccccgactttttcaatggaatgggttactgtggtgaaatgcaactcacagattactcagaaaagtcgattaaaagattcagaaattacttatttgataaatataaaaatataaaatcactcaatgatacacttggttcagaatatagatcatttaatgaaatcaacccatcatcaaaaaatataaacactgtgcatctgaataacttttttgagcaccttgattatgcttcatcgggaaggttagcaatatatggttgggcagcaggaaacggtcaaggtccagcaaaagtcaggatttttatagatggaaaagatgtggggtatgcagaaagcgggctcagtcgaatggatgtatatcaggccatcccaacattgggcacttcagctgtagggtatcgatattatcttgattttcgaaagatgagtaaaggaattcatgttgtagatgtcgtccatgacgataatgggaaattgacattgatgaaaagcatagatgtgccggtaatggatcgacaacaaacaaaacctgttcgtgtcggagaaggcataaagttgctcgaagagaaaagcatgaagttctggaatgattatcctgagacattacaaccagtgtattacaatccattgtccgaggaattttataactttagaaaaaaagaggtagcaagagagatacaaaaatatgcagatattgtaagctcatcatgcattgggagggatagaaccttttctcaccaaatagcgccaatgtttaatgcagactggaatgaggaaaaaattgcagttgaagactcacttaaaaagaataatcattataacattggattaaatgcctgtggttcagcattttatggtgactatatatttaactggttaaaaacgtctggaattgaaagttatggaatcccagaagtgcaccctatggttgaaaacgaagaaatcatctatgatgcattggaacatcatcataacaatggtgcaatattcattagcccttactatttagaaatgaaaccagaaagttttggcgtcgataaagaacacaaaaaattcagtatcaatgaaaataacacaaattattattcatcaagtttctatcatgccctaagcagaatcatgaaagaatagtgagcataacattttgtgtcaatcaaataattatagaggctcgggcaagcacaaaatgcttgcccgataggtcactctcttcattcacttttgcaagagaaggaaacaatgcccggccatataacactatctaacctaatttggggtaccaatacttatcgaacaatttcatgtaatgcacgacgcgatagttgtcgtttcacatatcgttgcaaacggtaggggataagtttggttgcccaagataatgcaggattttgccgcaacatccataatacagccaataatttttccttccttccatgaggttgagatattttttcttcagctattgtgatgttctctgaagaatagaaactatctatcaaagttttaaaatcaattctgccaagctcgctttcacgccaccatgaatcacgaatataataatcttgatagaaatgatcaacacgtgtttctgacgaaacatccggcataggatcaacattctgttgctggaaaaagccatcgaaatctgcaatagcttgtcgccataactcactcattctttggaaagatatatcccaattaataatccggctaaattttcgtccgatgagtcgttcgccaaaggcaccaatatttggtacaacaaccggtaacccatattgaagtgctgcactcaacgtataactatatgtctcaggccattgtgcagggaaccacattacatccggagcaatatcattgagttttttctctaaatcctgattagaatacgcaccatggcaaataaccgcatcatttagcgtactacaagcgtagccaagaagatggaactcaatgttttctcttttaagtgcatgcgccacctcatccagcatgaaagcgcccttttcacgactgatagcgccaaggacaaggactttcagtttccgatcacccgtgtaagttttcctgacatcaggatatggagcatttttttcgtaatcaggatgccatgcgatgacagccttctcagaaatatcgggaaaatatcttgtaaaccgaaatttagtatctgccgacgggaaaataactcgctcagccccaaataaccacgcattcatatttgaacgccatgtggcagctgacattccaacaggtaacggatatgtttccgcgcataattcgtccatgtttgttgtattatcgccgataaaaagaccatttttgtcggttagcgatgggtttccatttattgcaaagtagtcatgaattgtgacgtcataggagcattttaaatctaaatgcagttttttgatcttctcagggattcccatcaaatgatggaaatggatatgcgatatacccaaaaagcgtaataatctcagcagatcatcatagccattttcaatatcaacagagatactttctttgcatgtgcgtccgtctgcactcaaagagattactacgctactgttgtctgcattaggctttaaaataaagaagcatgctcttcctttgtaaaaattagacaactcttcgagatgataggttgtcccgccccccatatgatgagaaaccagcagtattttctgaagatttgctttcgccagaatgcgcagtagcattcgctggcgagcttgcttagcaggatctcttgaaataaactccattacatcacgggtatagtttggatgtaattcattaaggagttccatcgcgcgtattttgcgcgggctttgctcgccagcgaaactaactccgcctttgtgataaacaaagacattcaattgatgaaagttaggccaaccggcttttgcagcacgttgacaccagtcattttcctcaccataaccacgaccaaaagtctcttcgtcaaaatatccaacctggtttaagcagtcacgacgaatgtacatacaaaaaccaacacctgttggtatctcgacaagattattttctttgccataagtttcaaattcatcatcgagagcctggacatccattccggaaaataattcattatcttcacagaaatttgggaaactacaaatcgtcgcattatttgaaaatggagttacgctccccacacgctcacgactataagctgcatcatagatacgttccagccatttattagcgacttcaacatcgctatttaagagaagaacatcccgtttcgaatgcagtttcatgccacggttgacggttgcaacgaaacctaaattattttcgttctcgagtaacttgaaactattgtcttgtgcacgtttgcgtagccaatctgtcaattcaggttcaggtgaagcatcattaataacaattaattcagcccatgaggggagggttgatattgctgactctatacattcctgagtttcctgtaaaccaccataaacgggtacgataacatcaaccagtatgtcattattatcattctcagcttgtaacaatttctcttgctgtaactctaactctagtcggctcacaatatcattcaactcaatattttttatcttcaactcttcgagctctttcaagagacctcgctcatacattccattttctacgacatctgtagtagatgttttcatatcaataatgctctgtttttctcgtgacgatagataatataggatatgcttacttaaaatttcatgttcggatggaaaggtcaatcgaaagcggatatattcagcgttaaataataaatcaaatggaactagataagaaaataaatagaaggttagacgttcaactcgctcatcaacatcatcaacattacaaaatgcataagaacaatcccccaaaatcttcacaggaatattcattagcattgcttccagaccgacactggaattaatagttagaatttttcgacatttcttaagaaaatcgatgattgacagattgttattatcaatttcatatccaagattctcatttaatctaaaatggcttcctgggtgcggtcgtactattttttttccaataaatgaaccttcagcatagtccaataaggcttgattatcgaaactattactaaatgcaaggatattggaatcgttctcaacttgcaaaactataccaacatcatattctggttcaatgtagtcatcatcgtttcgactgttaataaaaaaatcacgtaacgctgaaatgcgattttttttattaaagacaacaccttgttgtttagcagcaaagtatctcttctccgcttcagtgttgccattgacaccagaaaaatcgaaataaccagtaaaaagatacgtcggagaacgcagcggacctaattcaagatttataactggaatattatatttttctgctgcagcattcagtgatggacaattgcatatggtcagaatacattcaatgtcgttttgtttttgtaatgcagcgattagagcatttttaaaatcaggaatgatttccgtcagaaatttcttaaaaaggagattactgttatcgccacactcagttaatgcttcagataatgattcttcattaacaatatagacgttgtctttttggcgaactgaaaaattaggaagttcgtagcctaaacgtttctgtccgtcatcagtaacctcccagcgcccctcttcctgccactttgtacagggtaacaaataatcttgtgtcgtaatcaatgccaacggctctttaatagccgtcatggctttatataaaaaccacaaataaggagcttttacaccccggaacggaaatgcgggtaaataaatgccaatcatgatagttcatccccttctataacatttacaggagaatgaataacaccaccaagttctctggatgaccaaaattttacttttgcaattggacgtcgctgatcaagctcctcacgctcaccattattaaaacaagctaaaccgcaatgaacgagataatcaccagtattgataggtagcttaactttatatttaagcttccgaagccccggagccaagtcaatcttatgcccggcaaaaatattattatccccccagatatccccgccttgggtccgagatagtgaaacgcctaagactacatcatttatattttctgatgagtttagcttgaaagaaaaataaatttcttcatttggttttacaagtggcttttcagagagaggagtgccatctgctttcataattgagaaatcttcaattatagctcgaccactaccaaaccgtttttcatcaacttcggcattggtttgcgtattttgtattgcggataattcatcagcagatgcaatttcccccgtctgggaaacagcttcttttttctctgctgtatcagtgcgctctgtcatcagcatacctttctcataggcaagaacggcagccaatacatcagtcgtattaccgactaacatgccatcactcattacaaggcagcgatctgcatattctaatatgctacctgtggaatgcgtgaccataatgatggttgttcctttttgtttaagcatttccatgcgcttaaagcacttatattgaaaaccaatatcacctacagccaatgcttcatcaacaatcagtatttcgggatcaatacatgcctgaacagcaaatgccagacgtacatacataccactggaataggtctttaccggttgatcaataaaatcaccaatgtcagcaaaatctaatatctcttgaaatttcttatcaatttccgacttacttaaacctaatacgctaccatttagatatacattatcgcggcccgaaaactctgggttaaaaccagctcccaactcaagtaacgcagccactcggccgttaacttcaatgtcaccgacagttggagtaagcgtaccgcaaatcatttgtaataatgtcgacttcccagcaccgtttcgcccaatgataccaacggtttcgccacgatttatcgaaaatgaaacatctcgtagcgcccaaaactctttaaaatagctgcgactttcacggcgaattacactttttatttttggggcaaagaattgcttcaatctgtcccatggctgggaatatatttgatagcatttgcttaaattagttacctttatcgcgatttgattagaggacatcagcaaatccttttcttgttttctggaaaaacacaaagccaagccaggcgacaatggatgctccaacagtatagagcaaaatacccataaaattaggtactcccccccaaatcaacacagtccgagcctgctcaattataaatgtcaaaggatttagcatgatccaaatatgatatttttcaggtagcgcgctgatagggaaaaatactggcgataaaaacatcaaaaccgtcgttatgatgactgtagtttggctaacgtctctcaaaaatacgcctaaagaagccaaaatccatgataagccgagactgaaaataacaagaggcagaaaaactaaaggaataaatattattgtccagtgtataaaaccattaaatataacaaaagcggttagtaaaaccagtagactaatagcagtatggaataacgcagcaaccaaggatatgacagataacgtctctaaagggaatattactttttttacatagtttgtattatttaatattatctgtggtgccctattgattacctcaccaaaaaaaccatggacgatcataccgacaaataatattattgcaaattgtgttctgctttcatctcctccagtcgaccatctggctttaaataccaccgaaaaaacaaaggtatacacagtcaacatgaataaaggattcaaaaatgaccataaaactcccattactgaacctttatatctgccgataacatctcgcttagtcatttgcaaaataatactacggtgagtatatatactcttaactatgtctaatggagataatgacggtttctgatgtggatttttcattttaagctctgaaataataccaaataaattaacttagctttcttgggatattacgcaatgctgattcgttgtaagcatatcgttttttatcaaaaaaccatccccacttattaaaataggtaatggccgaacgaatatgataccaaagcaacaatttacttttataagatcccttattgaaaacatgaacaattgttgtttcggggcaataatagatcttcgtaagttgtaaagcacgacgacatagatctacatcttccaggtacataaaatagcgttcatcaaagccattcaacttttgtaatagaacattcgtcaaaagcataaaacagccagataccgaaggaggtgaaaataccttatcatactcggcatcctttaactcgtatgtagcatcatacttaatagcagtggtaggaagaaagcgtcttaagaagagattactgggcgttggcaacaggcggcaactatattgacgctcaccattcttatagatgatctgcggggatacaaaattatattcatttatccatgcaaacgatactaatttatctagagactgcttatcaaaactgatatcaggattacatattaaaaaatagccatcaaaatctgaacttgctttgatggcgagattatgtccggcaccaaaaccacagttacgaggagacttaatataactcacttttggttcattcaatgatgcagcccactgacaaccaccattatcaacgaagataattttttcaacgctctcttcatggcataacgagagaagcgtatctttaatatcatcataggaatgattaaataatacaatagaagcaataacttttggcttcattgctttataagtcattaatcgattacctttaggataaattttttattattatttttaaatagccacttgtgatatccataatctaacaagcaaatttatacttatgcgtagacttcagctgtggcaagagtatgtgcctgcagatctttctccgacagcgacagcgcgcagtcgcccagcgccggccagtcaatccctatctccggatcgttccagatgatgctccgctctgactgtggcgcgtagtagttcgtcgccttgtagacaaactgcaccgtgtcactcagcgccataaacccgtgggcgaatccttccgggatccacagctgacgtttattctctgcgctgagcaccgcgcccacccatttgccaaaggttggcgatgaacgacggatatccaccgccacgtcaaatacctcaccttccacgcagcggaccagtttgccctgagcgtgcggatccagctgatagtgcagcccgcgcaatacgcctttctgggactgggagtggttgtcctggacgaattccacctggcggcccaccgcctcattaaacaccttgctgctgaagctctcaaagaagaaaccccgcgcatcaccaaacacgcgcggttcaaaaatcagcacctcaggaatatctgttttaataatgttcatcttttgccacccgtttatttacccaggacttctgttaccacgcgagccacaccctgacgccagtccgggagagtcaccccgaatgcctgctggaatttttcattcgacaggcgagagttgagcggacgcttcgccggcgtcggataggccgtcgtcggaatgcccttcacttcctgaaccgccagctcggcaccgtgcgctctggccacctcaaacacatagcgggcgtagtcgcaccagctggtctcgccgctggccaccagatgataggtgccggccagcgccggatcacgcagcgtttcacggattgccgtcgccgtgcagtctgccagcagctctgcgccggtgggcgccccgtgctggtcgtcaatgatggagagcgtctctttctcacccgccaggcggagcatggttttggcaaagttggcaccgcgggtggcatacacccagctggtacggaaaatcaggtgacgcgggttgccctgctccagcgccagttcaccggcacgcttggtttcgccgtagacgttcagcgggccggttgcctcatcttcccggcgataatgactaccggcgccgtcgaacacatagtccgtggaatagtgcaccatcagggcacccagcttcgccgactccgccgccagcaccgccacccctttgtcgttcagcaggtcggagagctcccgctcgctttcggccttgtcaactgccgtgtgcgcggcggcattcaccaccacgtccgggcggacggtacgcacggtctgcgcgataccgtccagattagtcagatcgccgcacagctctttatcaaagtaatccaccgcgaccacatcaccgagcgtggacagggagcgctgcagctcccagcccacctgaccattcttgccaatcagtaatatcttcatcttgttattttcctttactggccgtgcggcttcagtcttcactgagcagacgtttcaggtaggcaccgtactcagttttcttcagacgctccgcctgagccgccaccccttccgccgacagccactgattacgataggctatctcttccagacaggcgaccttcatcccctggcgcttctcaatggtatgaataaactgagaagcttcaatcaggctgtcatgggtgcccgtatccagccaggcaaatccgcgccccagcagttccacctgcaaatcgccgcgctccagatacatctggttcagggtggtgatctccagctcgccgcgctcagaaggcttgacgtccttcgccatctccaccacattgttgtcgtagaagtagagcccggtcaccgcccagtccgatttcggcttcagcggtttctcctcgatggacagcgccttaaagttctcgtcgaactccaccaccccgaaacgctccggatccagcacctgataaccaaacaccgtggcaccggaggtcttcgccgccgccgcttccagttttttaccgaagctctggccaaagtagatattatcccccagcaccagggcgcaggcatcgttgccgataaacttctcgccaatgataaaggcctgcgccagaccgtccggcgacggctgaatggcgtagctgaagttcaccccgaactgcgacccgtcacccagcaggcgctgaaaggaaggcatgtcgtcaggcgtggagatgataaggatatcgcgaatgcccgccagcatcaggacagacaccgggtagaaaatcatcggcttgtcgtagataggcagcagctgcttggagacgccctgggtgatggggtataaacgcgtgccggagccgccggccagaacaatacctttcatctttacttccttattagttattcagaccaaggcgctcaccggcataggagccgtccagcacgcgctgccaccaggtctgattgttcaggtaccagtgcacggttttctcaatcccgctctcgaacgtctcctgcggcacccagcccagatcgcgctgaattttcgcggcatcaatggcataacgcaggtcgtgtcccggacggtcggtgacaaaagtgatcaggtcagcaaagtgggtgatgttgcccggcttctgcgccaccactttgtcgagaatggcgcagatggtgcgcaccacatcgatatttttacgctcgttatgaccgccgatattgtaggtctcgccgctcttgccttcggtcgccactttgtacagcgcacgggcatggtcctcaacatacagccagtcacggatctgctccccgttgccatataccggcagcggtttacccgccagggcgttgagaatggtcagcgggatcagtttctccgggaagtgatacggaccatagttgttggagcagttggtcaccaccaccggcaggccgtaggtgcggttccaggcgcgaaccagatggtcgctgcccgctttggaggcagagtacgggctgctcggagcgtacggggtttcttcggtgaacaggtcatcggtgccgtgcaggtcgccgtacacctcatcggtggagatgtggtggaagcggaaggcctgcttctgcacgtccccaagtccggaccagtagtgacgggccgcctccagcatagtaaaagtgccgatcacgttggtctggatgaaggctgccggaccatcaatggaacggtccacatggctttctgccgccaggtgcatcacgatatccgggcggaactcgctgaactgggccgccacggcagcagcatcggtgatatcagtctgggaaaacgagtagcgttcgctcccggccaccggcgccagggattcgaggttgccggcgtaggtcaggcagtccatcacgcggacttcatcccgggtattttcaatgatatgacgaaccacggcagagccgataaagcctgcaccgccggtgacaagaatcttcatactttctctcgtttttcaatgacttaaataataaattctgtaataacaaaaaacgcaggcacgctaccgccattggctatcgcaaccaaaatgcgtggtgcctcagtaaagtgtatttaacatgagctaagatcagcgttccgcgctgcctcatcatggtacaaaccagcccaaccgcggtaactttgcttgcttcagcgtacattcgctatcaggactttcccaaacacaacaaggtacgtcatcgagacgaaatgtgaatgtgtctttaaagcacctgacaatcgtcctttcaaacgccattcagcgattggtctcatgacaaagccatgcagtcaccattatggcgagcaacatactccacagtgaatagtaccggacgaggtcgcgacgcattatagcgctggtcatgaagaataaaaatcaaaaagcggtttgaatcaattcaaggcatgaatgaaacgttttcaatacaatatcaaaaaattcaatcacttgtccacacatcattcgattacaagctatctctggtgacaaccacactaattaattcgtatttcacgaatagatataccacttcgttcggaaattcgtgatgtgttttatcgtgatagcagtatcccagggactggccgccctacaacagacattatggataagctatagacatactcaatgataacaccataaatgaatatcatttgcattaagtagcaattaagcactacagcgccactacaactcacatcctgcaactgtaaagcaagtgatcccaaccgcaagccagtgtaaaatcggcacttatgtagaacgggatatccacaccccggaggaaaaatatgaagtttttggtcactggtgccgcaggttttatcggcttccatatcgcgcagcgcctgctgaatgaagggcataatgttgtcggaatcgacaacatgaacgactattatgacgtcagcctgaagcaggcccgtctggatcgcctggcatatccggcattccatttccagcagctggatctggccgaccgcgaaggtatggcaaagctgttcgccacagagcaatttgatcgtgtgatccacctggccgcccaggccggtgtgcgctactcgctggaaaacccgtatgcctacgcagacgctaacctgatggggtatctgaacattctggaaggctgccgtcataccaaggtgaaacacctggtgtacgcctcctccagctcggtttacggccttaaccgtaaaatgccgttctccaccgaagattccgtcgatcatccggtctccctgtatgccgccaccaagaaagctaatgagctgatggcgcacacctattcccacctgtacggcatcccgactaccgggctgcgcttctttacagtgtatggtccgtggggtcgcccggatatggcgctgttcaagttcacgaaagcgatgctggaaggaaaaagcatcgacgtttacaactacggcaaaatgaagcgcgacttcacctatatcgacgacatcgtcgaggcggtggttcgggtgctggatgtgatcccgcaggccaatgccgactggaccgttgagagcggttccccggccaccagctccgcgccgtacagggtatataacattggcaacagctcaccagtggaactgatggactacatcactgccctggaagaggcgctggggatggaagcgcagaagaatatgatgccgatccagccgggagatgtgctggacaccagcgcagacacccaaccgctgtatgacctggtgggctttaagccgcaaacttcagtgaaggacggcgtgaagaacttcgtggactggtacaaggattactatcagatctaatccccctgccctgccgcaatcgtcagattgcggcacctcttctatggaacctccgttatccgggctatatgtcgactgaatgcacattcattattttatatataatattttgtgctatagacgctatttttgcctttttactcgcccgcctgaaaccagtttcatccagcctttttcagaaaagcaaatatccgcgcgccaggcactgaaacttttctgatatccagaccaatttggttagcggaaacagcattatatgctgattgataaaaaacattactatctgtaggaattttcctaaatccaggatatgttagagcaagccatgcaacagcacaaaactgatgtattgcttatcaaactaataattcaatcaacatacgccctgtggtagatattatggaaaacctatttttcttagtggtcgctgccatactacttgctgtttccgtttatttcttaatttcttatttaaaagacagaaagaaaacgaaactgacgtttaataaacgcaagtggtaaggcccgatccgtattacaattagattaagataatattaagagataaaaaaatgatatgacagaatgactattcattctgcgttttggcatggccttaaggcaagaaaaaataacgctactcgcgccctgtccctcgttttttcataggacataaataacaaaagcctgcgttgcaggctttgttttacctcccggcgcttatctccggcatctacatcacagtgacggtagctcttcacaaggtaagtttaacttatcggacctgttttcaacccgcaacggcttttgagcaggatcgtaatgtccatcacaatttattgaggttaatctgaatgtgcgagaaatacacgtagtgagggatataacgggggagagaaagaagaacactggcggcagggaaccgccagtgtcagacaggcagaattaatcgttaccaaacagatcgcgggtgtaaaccttgtccgccacatccgttagctcttccgccatacggttagagatgatcacatccgcctcttgtttgaaggcattcaggtcgcgcacgacgcgggagttgaagaactcatcttcctgcatcaccggttcatagataataaccggaatacctttcgccttgatgcgcttcatgatgccctgaatagaagaggcgcggaagttgtccgaaccactcttcatgatcaggcgatacacacccaccactttcggcttacgagcgagaatagaatccgcgataaagtctttacgggtacggttagcatcgacgatagccgcgatgatattgttcgggaccgattcgtagttcgccaacagctgcttggtatctttcggcaggcagtagccgccatagccaaaggacgggttgttgtagtggttgccgatacgcggatccaagcataccccttcgataatctgtttgctgttcagcccctggctttcagcatagctgtcgagctcgttgaaataggcaacgcgcagcgccagataggtgttagcgaacagtttgatcgcttccgcttcggtggagtcggtaaacagggttgggatatcctgcttgatcgcgccttctttcagcagatcagcaaaacgttcggcacgcgcagagcgctcaccgatgacaatacgcgacgggtgcaggttgtcgtacagcgcacgtccttcacgcaggaactccggagagaaaataacattatcaatccctaaacgttctttgatgtcgcgggtgaaccccaccgggatggtcgatttaatgatcattaccgcgttcgggttgatctctgtgacatcgcgaataaccgcttccaccgtagaggtgttgaagtagttggttttgggatcgtagtcggtcggcgtggcaatgatcacgtagtcggcattacggtatgcgtcgtgcttgtccgtggtggcacggaaatttaacggtttttctgccagatattcctgaatctctttatccacaatcggagagatcttctggttaagcatatccactttggcctgtacgatatccagtgccaccacttcgtggttttgcgcgatcaggacaccgttcgataaaccaacataacctgtaccggaaatagtaattttcattcgattacactttaatcagttaactgggtaatggcggctagccacgaatttaaataatgctgtgcgcggttttacgctgagaaggaaggtaagtcaagtcggtcggttgaccaagcttgtaaacgaataaacatgacgagttccatttggaacccgccattttaggaaaaacaacctaattatttataaacttctgcagtggccagagtatgtgcctgcagatctttctccgacagcgacagcgcgcagtcgctcagcgccggccagtcaatccctatctccggatcgttccagatgatgctctgctctgactgtggcgcgtagtagttcgtcgccttgtagacaaactgcaccgtgtcgctcagcgccataaacccgtgggcgaacccttccgggatccacagctgacgtttattctctgcgctgagcaccgcgcccacccatttgccaaaggttggcgatgaacgacggatatccaccgccacgtcaaatacctcaccttccacgcagcggaccagtttgccctgagcgtgcggatccagctgatagtgcagcccgcgcaatacgcctttctgggactgggagtggttgtcctggacgaattccacctggcggcccaccgcctcattaaacaccttgctgctgaagctctcaaagaagaaaccccgcgcatcaccaaacacgcgcggttcaaaaatcagcacctcaggaatatctgttttaataatgttcatcttttgccacccgtttatttacccaggacttctgttaccacgcgagccacaccctgacgccagtccgggagagtcaccccgaatgcctgctggaatttttcattcgacaggcgagagttgagcggacgcttcgccggcgtcggataggccgtcgtcggaatgcccttcacttcctgaaccgccagctcggcaccgtgcgctctggccacctcaaacacatagcgggcgtagtcgcaccagctggtctcgccgctggccaccagatgataggtgccggccagcgccggatcacgcagcgtttcacggattgccgtcgccgtgcagtctgccagcagctctgcgccggtgggcgccccgtgctggtcgtcaatgatggagagcgtctctttctcacccgccaggcggagcatggttttggcaaagttggcaccgcgggtggcatacacccagctggtacggaaaatcaggtgacgcgggttgccctgctccagcgccagttcaccggcacgcttggtttcgccgtagacgttcagcgggccggttgcctcatcttcccggcgataatgactaccggcgccgtcgaacacatagtccgtggaatagtgcaccatcagggcacccagcttcgccgactccgccgccagcaccgccacccctttgtcgttcagcaggtcggagagctcccgctcgctttcggccttgtcaactgccgtgtgcgcggcggcattcaccaccacgtccgggcgaacagtacgcacggtctgcgcgataccgtccagattagtcagatcgccgcacagctctttatcaaagtaatccaccgcgaccacatcaccgagcgtggagagggagcgctgcagctcccagcccacctgaccattcttgccaatcagtaatatcttcatcttgttattttcctttaatggccgtgcgggttcagtcttcactgagcagacgtttcaggtaggcaccgtactcggttttcttcagacgctccgcctgagccgccaccccttccgccgacagccactgattacggtaggctatctcttccagacaggcgaccttcatcccctggcgcttctcaatggtatgaataaactgagaagcttcaatcaggctgtcatgggtgcccgtatccagccaggcaaatccgcgccccagcagttccacttgcaaatcgccgcgctccagatacatctggttcagggtggtgatctccagctcgccgcgttcagaaggcttgacgtccttcgccatctccaccacgttgttgtcgtagaagtagagcccggttaccgcccagtccgatttcggcttcagcggtttctcctcgatggacagcgccttaaagttctcgtcgaactccaccaccccgaaacgctccggatccagcacctgataaccaaacaccgtggcaccggaggtcttcgccgccgccgcttccagttttttaccgaagctctggccaaagtagatattatcccccagcaccagggcgcaggcatcgttgccgatgaacttctcaccaatgataaaggcctgcgccaggccgtccggcgacggctggatggcgtagctgaagttcaccccgaactgcgatccgtcacccagcaggcgctggaaggaaggcatgtcgtccggggtggagatgatcaggatgtcgcgaatgcccgcgagcatcaggacggacaccgggtagaaaatcatcggcttgtcatagatcggcagcagctgcttggagacgccctgggtgatcggatataaacgcgtgccggagccgccggccagaacaatacctttcatctttacttccttattagttattcaggccaagacgctcgccggcataggagccgtccagcacgcgctgccaccaggtctggttgttcaggtaccagtggacggttttttcaatcccgctctcgaacgtctcctgtggtacccagcccagatcgcgctgaatttttgccgcatcgatcgcatagcgcagatcatggcccggacgatctttcacaaaggtgatgagatcggcaaactggctgatgttgcccggcttctgctctacgactttatcgagaatggcgcagatagtacgtactacatcaatattcttacgttcgttatggccgccaatgttgtaagtttcaccgctctcgccctcggtggcgactttataaagtgcacgcgcgtgatcttccacatagagccagtcacgaatctgttcgccgttgccatacaccggcagcggtttacccgccagcgcattgagaatggtcagcgggatcagtttttccgggaagtgatacgggccatagttattggagcagttggtcaccacgaccggcagaccgtaggtacggttccaggcacgaaccaggtgatcgctaccggccttggaggcagagtacgggctgcttggcgcatacggcgtttcttccgtaaacaggtcatcagtgccgtgcaggtcaccataaacttcatcagtagagatatggtggaaacggaacgcctgcttctgcgcggcatccagggtagagtaatagtgacgtgccgcctccagcagggtaaatgtgccgatcaggttagtctgaataaaggctgccggaccatcaattgagcggtcgacatggctttctgccgccaggtgcatcacgatatccggacggaaatcgctgaactgctccgagacggatttagcatcggtgatatccgtctgagtaaaggagtaacgttcgctatcggcaaccgtcgccagagattcaagattccccgcataagtcaggcaatccatcacgcgtacttcgtcctgggtattttcaataatatgacgtacaactgcagaaccaataaaacccgcgccgccagtgacaaggatcttcatatttaatctacctttaatgttaaatacagacttcaagttaatagttataaaagctcagtatattaaatttaatacactagccttactcagactgctgcatcaagaaatatattcagaatagagtatagtcaaattataaaattactaacatttaacgctaaaatataagggaacgcttatgtttatagaataataatccgaaaatcctggggtattcccccaggattaaagcagaatggaattactccatccactcggtatggaatacaccttctttatcagtgcgtttataggtatgagcaccgaaatagtcgcgctgagcctggatcaggttagctggcaggactgcagagcgatagctgtcgtagtaggcaatggcagcagagaatgtcggaaccgggataccgttctgaacagcataagccacgacatcacgcagcgcctgctggtactcatcagcaatctgtttgaagtacggcgccagcagcaggttagcaatgcttgcattctgctcgtaagcatcagtgatcttctgcaggaactgcgcacgaatgatgcaaccggcacggaagattttggcaatctcaccgtagttcagatcccagttgtattcgtcagatgcagcacgcaattgggagaagccttgagcataagaaacgatcttgcccagatataaagcgcggcgaactttctctacaaactcagccttgtcaccagccagttgagcttgcggaccagtcaatactttagaagcagcaacacgctgatctttcagcgaagagatataacgagcgaaaacggactcggtaatcagagacagcggttcgcccagatccagtgaactctggctggtccatttaccggtacctttgttggctgcttcatcaagaatcacgtcaaccaggtatttaccttcttcatcttttttagtgaagatgtctttggtgatatcgatcagatagctgctgagctcacctgcattccattcggtaaaggttgccgccagttcttcgttagaaagagccagaccacctttcagtaaagcataggcttcagcaatcagctgcatgtcgccatattcgataccgttgtggaccattttgacatagtgacccgcaccgtcagcaccgatataggcaacacatggttcaccatcttcagcacgagcagaaattttctcgagaattggcgctaccagctcataagcttccttctgcccaccgggcatgatagaaggacctttcagtgcgccctcttccccaccagaaacaccggtaccgataaagttgaaaccttcggcagacagctcacggttacgacggatggtgtcctggaagaaggtgttgccaccatcgatgatgatgtcgcctttatccagatacggcttaagggaatcgatcgcgctgtcggtacctgcgcccgctttcaccattaacaggatgcggcgtggagtttcgagggattcaacaaactcttgcacggtatagtacgggaccagtttcttgcctggattttcggcaatcacttcttcggtcttttcacgggagcggttgaaaacagagacggtataaccacggctttcgatgttgagcgcaaggttgcgccccatcactgccataccgacaaccccgatctgttgcttggacattacatactcctgtcaggtgtggtcactgcgacacgttcgcagtttaaatgtagtctagcatattagctcaaggtagagagatcgcatagagcaattttagttctattattcaacaggtattatggaatattaattaaacacggctaaagaaaatcaaaataaaacacatcaaagacaacgactctttttacgaattttccctagaacaaatcctctaacaagtgaagatgtaagcataagagataagaaatatactatagctcctgaaaaagcaaaaagaattaaagaaaagatagaatcaatttgacttgaactataaaaataatccagcaaaactaaaaaaaccaacattattaatgtggaaaaaataatagaagccatcttattaaaaaaacaataaatattaccaccaattgtcttcattaaaaaatacataacaggaaagaaattgcatatattagcaatcatgtagcacattgcaaacttaccaatatcgtaattaacgccaataaggaatgaaccaacctgcaaaaatgtacctaaaatacctaaccgcattagggtatccgttcgccctttagccataaaaacagcaccactaatgcttagaactgcttgtaaaattgcggttggccctagccactttaacacatcggatgtaagatgccattgaggtccgaatataatttctacaaacggctgactataaaatgcaagacctgtcattaaaggagatgtaataagcaatacaatgaatgcgcaatttagatacgtatttagaatagtttcattatcatcttgtgttttactcaatattgggtataaggatcgtgttgtaacgaacgtaagactttgcaatgggaaaagcattatcctatatgcaagattataactcccgagcacagccgaagacataaacttgccaataatgaaactatccgcatttcttgaaaaatagttaataaaattaaaaagggaaaggtttgcgctaaaaccaaagatcatcctaacttgttttaactcaataaacttgttaaacgatggtctccactttgaaatataccaaaactgcagcgcagaaatcaaatttagagctatagcctgtccaacaagactataaacaccaaaaccagaataagctaatattaatgcaataatgacggaaatagcagaagaagaaacttcaaccatcgagatttttttaaacgcagactctcgctcaagaagagccaaatgtgcagatgcactacaagataatggaaaagtaatacttaaaaggataagaacatacattaatttaggttgattatataccatggaaataaatggtgacattaatagtataaaaaatgccaatccaaatcccatagtaatattcaaccaaaaaactgtgttaactaaatcatgagataaatcttttcgctgtattatggctgctgatgttcccaaatctctcaaaagaatgcctaggttaactacaactaatgccatagccattatgccatactctgaaggaggaattaatttggctaaatatataatattaaccaactgagctatcattttaaaaaactgggatgacatattccacttagcattagaagctaaactcataattttggaccctaatctatcaaaagtgttcagcacattacaatgctttttttccattgaacctatatatattttggatttttttacctatatttatacagggtgcctctataaatctatatgtgagtgaagaaataaataccacagcaatggtgacaaaaggcataagaattaaatattcagacaaagataagccagagaatttattcattaatataaaaattgaaaagataacacaaccgtgaattaaataaatactataacttatttcaccaagcaaccttgctccttttaaagttaaagcaccaaaaagattatttccacaaacaattgcaataaagaatagcagcaaactgattatgctaaaaatattaaatatacctacccctgagaaaaagacatagattaacaagaccattaaaattatggaaattaatctgttgcgaagaatctctatgagttttatattattctcaagtaacttacagatatagttactaatgccaccaatcataaagaagataaaatatctagagtcaataatagaatggaacttgaaattattaataagaaggagcatacagacgattataattaatgttgtagcaactttattttttaaaataagaaacaggagtggcaaagaaaaataaaatagccactcatactttaacgtccatgtcacacctgccgttattctcttcgcatctgtatagccatttacagaatcaccaacaaaaagcaaccacctaacgatatcttttaaaagctcactatgcggtatttgaatagaaagaccagtaagcaaaaatgaataaaacaaagtaatcataacaacaagaaggtaaaggggcattattctaaaaaatctagaaatatagacagaaaaaaaatcaaaatgtctacctgaagtgatctttcctataaacaaaaagccagtaattatgaaaaaaatagcgacggaaacctgccctaaatcatcaataaataaaatttctggcttttcccatttgccagattctttccatttataaaaaataaaaaagtgatgaaaaaaaacgaataatgataaatatgctcttaacccatcaattgctgtaaagcggcccgaattgattagttctatacctaatttattagaaatatactttataatcactaacgagataacaacagataaaaatactgctaataaaaaaataagtcctatcgtctatcacctcttaaaatagtgcagaatagataaattcatggtttggcattcaaattttttatatttatgtcaataccaatcatgcatttttttctatccgaaactcgattatcaattgaataactggtattttttattttcgagaaattcccggtctgttgatttataaccatataaggcctactacctaaagtatgtacggctaaacaatctcgcataatcgatccaggaccaactaaagtaagctcaactccaccgaaaaattgcccattattaatggcctggcaatgtaacatttgtacattttcactttctttcgaaataattccatgagaaccattcaactcggcaaaacaattgttaaaaatattcccccccccttgggaaacaatacctgcatgataattttttattgtaatgcaatcctcaattttaacaaaagagtccaaatgcatataagaaccactgccataggcattttgtacatcaaatccatcataatattgaccagaagaaaaacaacctttgataaaaacattcgtacaacaactggttgttgatgtccatgatctttttacatattgcgcagttttaatccccgactcaccattattaataaatcggcaatgctttactacaacgttgtctgagccacttaaatatagtccgttattgttacattcatgaaaaatgcaatttatgatgttatgatttttcccacgacaaaatataaacggattaatatcagtagtcgagtatgcccataataatggttccctagtcccattcataatactaataccacctatatggtttccacctctaatattgcagtttataaaattgcaattatcaaagcccgcaacgactacattaccatagtttgtactcaatccttggaccaacaagccatgttgtacactttgagttgaagagcggaaaataatagcacagcctatcatttgtgattgatatttagcagggatgcgtttttcatcattgaaaggcattcggccattaccaataggcccttgctgaattatgttccaatgtgaatcatatataaccgtatatggtactgtatcactaattaacttaccaccattccaaatacttccgccaccatcgataacctccataaaacatccatcgcatttgatagatgcgttcctagcatcaaccacaatagcaccagaaactataattttagaagtaatacgataagttgcattttctctaaaaactatattatttttaattttaaaacatttcgtcatggctaatgtatcgtctgcgataccatcaccgattgcaccaaaaacttcaggtgtcacattcttcttataaaaataaaagtcaacataagaaacctcattaacggaaagctctttaaaatatgacttttggttattccattgactaatggaaactctaactgggatactatagctagtaacttctctatctagcttataaaattttccatttacagatataatttgactgaaagatgaaatagttagatcatctatcgataaatcgccaaaaaaacggagcatcccgttatctatttctttaccaaataccttattcttgtaagaaataaaaacaaaagaagaaatcacaaataaaaaaacacgtcgtgaatatttcctcataaaatcgccttatttacaagaatggacctaccacatacagcgccgaattactccatttatctcattgcgattcaatatattacacttaatatttattacactttcaatatcagcctttgatgataggatattaacatgataatcagcacccttcatataagtatagtcccaaaatggcatggttgaaattattagtaaaattgagagataggcaagtttgaataaggaaaaatgaccatcgcgccctttgctatcaagataattgtccatagataagactaaaactggaggtaagtaatatccaaatcgcagtaacacgggagtcatccttgaaagtgttaaaaaatacacaacacttatcgcactgtatattcggttcttcttctgtaagatttggaataaaaacaacattaacaagaagaatatatacaagaaaaaaaccctagacttcaataaccaatcaacaaagcctccatctgcccatgcatacatggaactatatatggcaaattttggaccaacaacaggtatgaaagaaagataagaagggttatataggaaaaatagaaacagtgctacaaatgttgttgaagtaatggtaaatcgataaaaacttttctgtcctggatttaataaaataaaataaagaaatgtaaacaatgatgatgcatgaaaaagtgacgcaactgatataataactatagcccttaatcgtaaattagaccttaatgcatttaaggcaaaaaggcatatagaaaaagccacaccctgtcttataccttcagaaaaaacataaaaacctaaaaaacaaaataaagtaaaaaaagcaattgctggtgactttgtcttaatacagaatttatatacactaaaataaataaataaaacagttagtccataaaaaatttgaaaatccacgccaaaataagaaaataaactcatacaccacaggtaacctggctcataaaaaaagaagtcataaccaggtgtattaatatttaaatatgaatcataataattcatccaatcgtatccaaatccgaaatttaaaacataaaaacctcctgtaataagaaaaagagagttgaaaataagtttacttcgagaaaaagaagcaataaaaaataaaaacgaaaaaaacaaaaatatcataacttatcctgattagatatatacatgaattttatttttttatttcccggacaaaggctgcaatagaattaacgacaggaaagcaaagcctcatattgtgcttaaaacttgccacttttctcccggaggataaaagtgtttttaaaggtatttttttattcctgttaattaaatcccttataaataaagaacttttcatttcttcacttaatgtttcagaatgtttttcaataaatgatctatatccaatatgggccttacttgatgttgatattctttttctatcattttcaacatccattacataagttgcttcatttgttttaatacatggcccaaatttcattataatgcgataccacaaatcataatcttgccatgcagggaaatttgtatcaaagccaccaacatcttcaaaataagataaacgggttagtaactggtttccaactagattttcataacccatatcaatactcgtaattacaccagaattatttttacctcgcttaagcttgttcccatccttaaatatcaaattagaacaaaccagatctattttacgttcattacaaaccttaattaatgattcaattctatttggtaaaaaataatcatcatcatctagtccagtcaaataatatccagatgctgcagcaatacatctattccggctgaaacatgcccccatagggctatcatttttcaaatatacaaagggaatgtctttatattctttttgcaacttattaaccacatcatcagtattatcgcctgacccatcattgcatataataatttcaatattcttataagtctgattaatcacagatttcactgcattactaagcaactcagcacgattatgagttggtatatatactgaaaccaatggttttttattcatatttttcccatatccttagttcgtaagtcaattacagcgggggtgtttccctaagaaaagacctttaaataaaatcatgaaatagtcaagcttgcagtatttaaaaagcagaagaaaattcttcataaacatgtacgattgccaaacagaagggtagcgtcgtgtagatatcgcagcatcccataaacgctctttaaacctgaaatcattaaatttttcttctgtcaaggataatgaatgcctgatataacaggaagtcttgatatcaaagtaagcacctttatttaataatttcttaagccttttaaagaaagatgaatcaactccatataatgcatatcgttcatcaaataactgcagattatttttataaaactcttttactaaatccctactaataatcaaccctgatgcaattgaaacacagaaaaaattgtatggatctaagtcgccatatttttctgaaattacacctgatgacattggataatatgtcttctcagtttctttactaataactctaggcagctctaaatctgcctttgatgagtgaataatgtcgacaaagctctgagttatttcggtatcatcgtctaatagtataaaatattttgcttctttattcccttctataaactgattatatactaaggataatggcctattatttaaatcattaataacatttactttatcgaaaacattactaaattgtagttttttctcatcgctaataattatttctttcggaccattgttataaatagttagctgagaatttttataatgaaacctcattaaagtattaatcgtttcagactcatcgatagtcttattataaataattactaaaaatgcattataaaacgcattgctcatatttctaccccacttttaccaaagtatcttccaaaataagtcagctgattttccgaggaaaatttaggaaatcgtttttttattgttaatttataaataccaattttgtcatttgccagtaaatcattattttcaggggtcaccgcttttggtaacaaccattctagtaaaaaacgattatcgccatgataaccaagtttatcaatatctgtgcgtaacaattccgaatattcaaaggcaagaagcataagataatcaactaaaaaataatcaattaaaatattatttttttcccaatacttattaaagcaatctctaattaagataaatggtttatagttcggtgggcattttaaaaaatatccagtccaaagacctttagatatactattcacattatcaaaatttttagattttaacgtaaaaaaatcggcgtcagttatgaatgataattctttcgtacaaaatattgtcgcatcaacccaaactccaccatacgtagctaatagattgaatctaagaatatcacttaactgtgcttttgaaataagacctgaagaatacttctcaagaacaatggctggaaaagtcacataattaggaatgttaatatcatcgagaatcactacttcatattcggaaggagcatttgtttttattgaattaatacaatgtttaactaactcaggtgcttcatctattccttgaaaccagcatacccatatatactttttgagagtgcccgcaacatctctattattaacttgtttctctattgatttaatatttaaatttgattttaaaaacctcaatattaaatatttcttaactacgaaaaacttactttttacagtatcaaagggtatccctctcttcataagatcgataaagtttataaaaagcaatagtaatctcaccttaacctctcacatatatgtcattttatatcggatacttcttcatataagtcttgatatgccttagccattatcgccgatgtgtaatttttttcaaaaacatctcttgcaatttttgattgtttatttttgtcaatagaaaagtaatattcatcaagcttttggatataatcttcatagctatcatcaagtttaaatagataaccacaagtttcttggcatttttcgtagacttccttatgtggatcaatatcagaacaaataaagacattgccgatagaaagagactcaagtagagctaatggcataccttctgctttcgatgctgaaacaaaacaatcaaattcggtgagtttgctgattggattatttattttaccataaaaacaaatattctcactttcaaactttttttccaaatgctttcgattttcgccatcaccaataatatgcaatctcgtattctttcctttactccataggtcaaacccctgtaggataaaatcaacgttcttccggttatttaaagaacctagataataaaaatcacaacacttgtcattatctttcaatctcagatcaataaacaaatcatcaacaccattagaaatggaattaattttaaacattcctaattctcgttcacaataaagcttcacagaattagaacacgcaactttcgtaaagcgcgaaatacatttcttttggactaaatataataaaccaccaataaacttacctcgccgaaaaatagaatcttgatcaagataattatgtaacgtggtaaataaacttgcttttggaaatgacaaagataaaaatatatcagctattatacagtgactatgtataatatcaaatttctcttttcttacttggtatgcaaacgttagaaaattcttcctagaaaatattgccacccgtccatatttagaaaactcattaactagatgtccaccacctaaagaaaaaattgatatgtcatattttctattatcaatttccctaactagacttagacacatatttatcggtccagcattactcatatctggtaatacatagagtatttttattttcctcatgtctcatcctgtttataaaaataaaattagcatatgaaaatatatcaatagtcaagtgaataataaagaccagaagaaaaaaatataattttatatagatgtatttatttccaaaatctcttgtgcatactgatcttccttctcatttctaatggaagttttttatagtgcccacctaatttgtaacctacaaacttcatgatattattaatacaagcttgtggtatccataaaaaaccattttttagcaaataagaaaattcagataagataaatcgtttcccttccccagtagcccctccaaactgcgcccttatccatggttcatcttgatggaacactccaatatcaaaataacgcttaaactcttctaatggactatagttatgtgagtgtcttacaattgcgcttggtacgtacgctgatttatagccaccgagtaatgcctttgcagcgaaatacatatcctcgcataatatagtatttgaaggaaaccctcctaatgacttaaatgcagataagcgatatgctgaaaacgaatttgacataaataccgattttagccctaaagaagtcacactttctttactactttcatatttaatatcaggataattaaaatatcttgcatgcttggctatcgcgttagcatccaaatgaggaatttgcttaccataagcgcaaacaatatcaggattattgaatatattaataatgttttcaacaaaaccttccagaggtatagcatcctgagttaaaaaaataaccacatcatattcaccaatatactgctcgacgattttatttctcgtaccaccatgattgaactcagtacttgatatgatatccacatcaaatcctgctgcttttgctattgctactgtattatctgtactaccagaatcaatcacttttacaaatgtatccttcggagcatgcttttttatttctttaactgttttttcccataatgaagaaccattatatgttggaactgcaatgtaaaatttcattcttcacctgttaatatgaatatagaaaatactaatacgcaccatctttcttcagaactacacttattgttttaaacagaatcgcaatatcattccacattgaccagttcttaacataccacgcatcaagatatacacgagtttcgtaatcaacatcgcttcgcccactaacctgccataacccagtcataccaggcttgctcagcagataataatctacctcatcgttataccttattaattcagcagtaatgattggcctcggcccaaccagactcatctcacctttcaagacattgaacaactgaggtaattcatccaaactagttctacgtaggaatgcccctatttttgtaattcgcggatcgttttttaatttaaaagttgcatcccattcttttttcgcttcagaatcactatctagtaatttttcaaggacttctttagaatttattaccattgaacgaaatttgaggcatttaaatgatttaccacctttgccaatacgctcatgcccatatatagaaggaccaccatccctctttactttcctacttatatatattaatgcaggcgaaagaatgataataatggctaaagatccaacgatatcaaaggctctcttaagaatccgcgatgaccattttgcaagattctgttgaacacgaaatatcatcacttcatgactaaaaataaaagacatatctgtactgtcgagaggcatcccacgcaatgttggaataacagagatatatcgatagcctttaatcataaaattacgcaaccaagcattacggacttcgctctggtgcgactcaacggccacaataaattgcgtttttttgtccattgatgataaccagtcaggatcatgtgccagaacaggaacaccattaatgtctttattttccgaacgctccccggttactgcaatgaatcctacaataacaagcccaaggttacgctcactatttattgctttataggcctcttgcgcattagccccactgccaattatccatgtgtctctatgccataatccgaatacgtctaacacccgtttggtcaccatccttgccaagggcaccagtaacaaaacaaaaaaccacgttagtacccacaaatatcttgaaaaggaccagcttgcaaatgccataaccgcaatttcaatgattgcaaaaatgactaatgtacgtaatatttcttttagttcaaaccaaaaggtcttacggtaaaaataatggcgtagtctcattgaataccaagctatgcagcataaacctaatagccaatgaagtgctttccatccttcaagttgattgactgagatgactgtttcataatcgctaattgtaatagataagacacctatcgctaaatataatgaaataacaaaactaaaaaaatcagatattgccaatgctatactgacaataaaattcctgacgagaagcgtcatattcccctctcttttcatttaaccaagccagtttgaaatagaaaaagcaaggacggatattacccgtccttttagtttattaaattttatcggttttccgaattatttgttatccttgtaggaataaccatagtggttatatccataaccataataactacttgcttttttaacaacaccattaagaatgcaaccttttacgactacaccagtttgctcgaagcgtttaataccgacctctatttctttcgccgtattcagctcaaatcgggcaaccattaatgttgttcccgcataattaccaattactgctgcatccgtgacggctaatatcggtggagtatcgagaacaacaatatcgtagttttcactggcccaattcagcagttcaccaaaacgcctgtgcattaataattcagctgggtttggtggagccattcctcgtgaaatataatcaaaaccagctgatgtgatcgtttttattgctttattaatttcaattttacctgacagaatatcagacaggccattggtattgctttcattgaacaacttatgcgtatagcctttgcgcatatcggtatcaataaacaatacttttttccctgtctgagaaatcactgcggctaagttcgaacttacaaaggttttccctgcattagggcttgcaccagaaatcattagcacattatttcttgcctccatcatggcgaaatggagactggtgcgcaaactgcggatagcttcaattgccagatccgctgggttatcaactgccaggaagccctgaatttcatcaacagactttttattccacccttttctctgcaccacacttttcgtaaatttttctgctactgggatacttgcatagacattaataccaagttcttcaagctgctcgggggtttctattcctctacgcaagaaaactctaagtagtacaattcctgcagagaacacaataccgaatataatccctgaaagaacaataaatacttttttcggtttaacaggtttaggttgagtgacggcattatcaataatccgcacattaccaatggcactggatttagcaatatttaactcttgctgccggtttaataattgcatatatacagcacgaccagattctacatcacgacttaaacgcaatatttcctgctgcgtttcaggcatagcagaaacgcgcttattaagcttagctttttcatcttgtagagtctttcttttttccatcaatgctttatacgtaggatgttccttggtatagagctgggatatctctgactcacgaaaagttaattcgttaagctgattatcgacattaactatttgatcaagaacggcttttgcctcaagagataaatcaacggaatcactctttctccgatattggtttaatttatcttcggcctgatccaaatcactacgaacctggggtagttgcttactcaaaaactccagacttttcgcgtcttgtgcggcttgccgtgcaatattctgagctaaatagttttcactaatgctattaagaatacgttcaattaatactggattatcgccggtcaaggagagtgttagcatcccagtatcttttccctgatcagctacggctatatcgtcctgaagatctgttatagccttcaatcgactaacatagacaattgaaaactcagtccctggttttgcgctgatttcatcaactttgagcgaaattccccgctcatcaagtagctctccaactttaccattgataataaagtcacctacggagatagaaaaactatttctctctttaacagttagtatgatctcaggagtatcattatcattttccggtatatacaaccgagaaatagatagactaccaggtttatctcccgataagcgtgcaaaaccacgccctaatagtgggaagtatttttgttttaccctcgcctgcaggttaagatcatcaactgtttttcctaaaatcatccgggaacgaatcaacgcaatttctggggccgattgaggttggctatccggaagcatctggctaagattgctaagtatggcattcgcttgtttctgttcaacctgaattagagcatcagcttgatatataggcgtggcaaaaatagcataaattaatgcgactaatgtgaatagagaagtaacagaaataataagcttgcgatgatctataaactcaccaataaggcgacctaaatcaatttcatccgcatctttagatgtagctttgtttgtaactgatgacatgcgatttttcctgaattatgcacctaatttctgagcccaaagtctaccggcctgctcaataagtttataaactgataagaaggcttcgtcacttttgcgataagggtcaggtatatcgcgttgctccaaccagtgaccaaatagcatcgttttccccctggcttctggtgctatatgcccgatctgctcaatatgggatttttccattgctaatatcaaatcgtattgacgcccaagagaggatgtaaactgcctggagaggtgcccctccaaagaaagcccatggagctgagcaaccttaatcgcactattatcagccgcatgctcaataagtgctccagtccctgctgaatcgatttttttatcaggtaataagtttcgtaaatatcgctctccaatcggagagcggcatatattacctgtgcaaaccacaagaattgaatcaaacatttctatcaccaagtccgaatgaatttacctgtttctgtcatatcatgaactcccgtaatagttggcacaagttgagatataactctattccaacgaaccaatggagctgtagtgacataaacaatatcatacggctgtaactggaactctgtacctaacaccatggccgaagcatcctgagcattaagctgatagatattcgcaattttaccctgactatcatttttaatctgacgaatgacaaacaccccagtagcatcactgaaagcttgtgacatcccctcagcgttacccagagcttccgccaatgtcatgccacttctatccatcttcattgtgctttgcttacctacttcgcccatgacaaatacttttagatcgtcattacgcggcacaaagagaatatcacctggatataacagatgattttgtgtcaaatcgcctttctgcattaatgcatacaatgagacttttgtgtctttcccgttatgtgttaatacaacattccgccagtccgcatctggtgcaagcccgccggccgcgttaatggcatccatcaccgttaatggaatattggtaattggctgctgccctgatttagtaacctcacctgtcacataggctttttgcgaacgaaaagcagcaacactaacatcaacctgtgggctttcaatataggtggttaaacggctcgctatatcctgtcgtacctgagcgagagtttttcccgctacctgcaccttaccaatataaggataaaaaatggtaccatcggagttaacccagttaccagtatcgctggcgctgcggtattggcctgcaggagtagttagttcagggtggtcccatacggtaaccatcagtacgtcaccaaccccaatgcggtattcataattgcgcagtaaattatcaagctgcgggtttggacgagcgagtacagtctccggacgaagctgatcgatcagtcctggggtcattggatacacgttcactaacttatccagatcgtagtcgctgtctggaagctcaaccacgttcttgcgcagactgtttaatccctgaccagggatgattgtacaacccgataaaaacccaatcgctaacgctaatgccgaaaatctaacaagttttttcttcataatgtcacatcatcagtaaatcaaaatttgccaattcctgagcagctgtcatcgccgttgcttacctgccggcttgtggagagataaaaactgactgcctcctgcagcactaccaccctctctcctctattttcagcattcagccttataaactaaacggtatctctatccctgcgctcgccccaacgtcatcgctgtcgctgttgttcgcgtttgtgtaccacaaagaggtattcagacgaacagactgatacacatcgccgctccagcctagctgtacacctttcaaagtatcggcatgggggaatgctttattgatcgactggttctcagggttaactttggcgtaaacgaggcgtgtactccaacgctggttatcttcggtaatcagctcaaccttcccggcaatgagttgaccatccccacccatcgcatcccccagtggatacccttgttggtaataaccatctttatagatgtggtgggtatagctgtaattggttcggctcatgttggtacgcgtgtcatgcgcttccacataccagttaaccgcatctttaccccaaccgtggtgcccttccactccaccaaggaacatattcgcggaaggcaggtagccagactcatcctcgccgaccatttgcccatagaaactcaccggccaccctagagtcggctcgagtttgaatttaaagtcaaatccggccagctggttacccggttcgttatccgtcccggtattatcatggccagtgaagccatcccagaagctgctaaatgactcaggccgcccttccccaccccactgcataatgcgtgacgcgcctaattctaaagactggaatggtgaaaaggtaaaacgaccgccgataattttggcatggggtaccgcggtatattgattcatctggctggcggagatctggtactgccatgggccgacccagcgcaaccaccaagtctctggcgctgcctgctctgcgcgctgcatcaggaaaccggtcatcggccgcatcgcatccccgcggatcaaactaccttcatagccaggcccccaccactgtggtatctggccaaaggagagccactggttccagaacttcaccgcgccataggcgccgttggcgttgaagcgcgatccgttgctgatccgctctcccccttcaacattgccctgaaggtggacgtcccaccactcgccgctgttgttgaacgccaggcctaacgagctatccgccggctgcgtctggccaaacccctgcggagtgcccggctgatctgttgaagtgtagccggtgacccggaaatccgcttttaaggcagacagtctctggttgatacgggccagaactacctgctcagaagaataggacggtttggcctttttcagcgcccgggcaatctcttcctggctgagcggccaggtcgacaggctcagatggatgaccccgcgatcggaaagccaggccaggtcgttacgcaagtcgttgtcatttaccactaacccggctgcgtaagcctgggctcccagggaggaaagcaaacccaacgtcacggcaatgcgcgcaatttttatcattgtacaagatccattttcagccccgctgtcgtatctcaatgagaatgaggggaataccaagatagaaagcgctcgcggcaccagctgacttcgctgtgcaacaccgacgaggcaagtacatttaccctaagctgcttgttagccttataacatccactcagctcacaatgtaggcgaattttaccctacaggctatcgatgagacaggaaagttaatatccaggcgatatcagcagccgctcctggccaacttctgaggatatccgtagaaaactgatagatatctagtgagggcgatcatcctgaccgggacgatttttcagccgttgaagagaacctctgtgcaacagcaagcggcttcagcgacgctaccgcccctggcttaacagctaccagtgcactgactacctgaacgacttaatttttatcgacctgtgaatgaataattggtcaggccattatttttggcggcgttaagtttacgggatttcggtcacaattgggagtgttgttaccgaatatctgccaattaatgccacctgtcgttctactgacaaaaaataagcgggtcaccaattaagattattcactgatttccagggttagaaatcttcccggtactgctacaacatcacacatgcagctaactgactgtaaaaaagcgtctttttccatagctcatcatcatgcaaaaatcagatgatggcgttatagtcaactacaatttctaatagtttcctgtgtctggatattcattgaatgtgcatcaggtaacgtctcagcgcatttaagaaacgtctgatcaaagctatatccaggcaaatattcaataacaatgtagtagcacttcattatttcataaatatgaattatcaattaccggatatatagtagattattttcttatttgtttaattaaccggcgaaaacttaatttcccctgtaaaacaaatggcgattaccaggcctgcttgtgcagatcggtacgcgtaaagggtttatccagcggccccaccgcggtggcgatttgtcccagcagggactgagtcggcgctttgctaccgctatgtaaaaggataagtggaaccatcaccaggcatgcgacaccgccccatgagatattcacgctttccggatcagaggtacgtttttgcaacaccaggaacaaagcgctgccagcagcgcccagcagcaggccggcaatcacttccgagacggaatgcgcatggatgaccagccgcgaatagcccaccacggcggccagaacatagccggtaataacggccactttacgcagaccgacggagatacgggcgctgagcagccacaggaagataggccagaaggccgcggagagcgcggagtggccgctgaagccggtgtaatccagctcgcgaatacccagaccccagcccataaaggccagtttggaggcgcagacgatagcgccggtgatgccgaacagcaaactccattgccacgccagcaaccgcgacgttttacgcagcatcaggacaataaacagcgccgctgcgctgggcagcaaaacagtgctatcgccaaaaaatgagatgagttgccagttcatatacctgtgatccttcgatgatgtccactgccgtgctcagggattatccgtaatgtctgtaccagctcgcatgccaattcatttcacatttttatgcatgcaagtgagatgtttaaagcggaaacatgatcgcagtcaagttttatttttggctgtcgttgaccgctttcccttcgctttaggaattgtcgcactaagtgactattcataaagcattattgccgctactccgaccattgcaccacagaggccagaaacaaactaccagaagtctccgaagccatacgtttctttacaatcgttataacattcgcgttatgaataatttctgcataacgttatgagcgacaggacgaatgttcacgccctgcccccccgtactacgctagcaatcaggccagcagttttttaatactttcgcggaatttggcgccttctttcaggttacgcatcccgtaggtgacgaaggcctgcatgtagcccattttcttcccgcagtcgtagctttcgccggtcatcagcatcgcgtcgacggattgcttcttcgccagttcggcaatggcgtcggtcagttggatacggccccatgcgcccggctcggtacgttccagttcggcccagatatccgccgacagcacgtagcgccccaccgccatcagatcggagtccagggtctgcggttcgtccggtttttcaataaactcgacgatacgcgccacctggccttcagccaccatcggctctttggtctggatgacggagtattcggagagatcgcccggcatacgtttcgccagcacctggctgcggccggtctcgttaaagcgggcgatcatagcggcgaggttatagcgcagcgggtcagcggtgccgccgtcaaggatgatatccggcaggaccaccacaaacgggttgtcgccgactaccgggcgggcgcagaggatggagtggcccaggcccagcggctgcgcctgacgcacgttcatgatggtcacgcccggcgggcaaatggcctgcacttccgccagcagctggcgcttcacgcgctgttccagcagggcttccagctcgtaggaggtatcgaagtggttttccaccgcgttcttcgaggagtgcgtcaccagaacaatctctttgatcccggcggcgacgatttcgtcaacgatgtactgaatcattggcttatcaacgatcggcagcatctcctttggaattgcctttgtggccggcagcatatgcatgcctagtcctgcgaccggaataaccgctttcaaattcgccatattcatcttcacctgtttggttgcaaaacacgcggttttgcaaaattgtacatgtcacaaatccattgaaactgataatacacggatactgcccgggcatctgcccgccaaattcttaaattcactgtcacgtaaaagaatacacacaactcccttttaccaacagttagaagtgagaataatcttattctcgttcaggttattcagcggctcgttcctttgcgccgcgcgatgtggctgagaggcccgtccatcagagtctgtaggccgccggacccgccgcgccgcgcgtatgcccggaaagaatagatagagataataaatttcgccaggcaatatatttcagcataaacagccggatatgacgacatattagcctgaatccgcggcggtgaactgcgatccgccctattctgcactcacttcataatatgaattatgccggttttgtgagcgggcttcgcgcttcgcttctgctctgcgcatccgcgctcgccgtgacgatccgcgggaggaggcccttttgccgccctcgctgaaacgcagcggaaaaagttctgatatcggcaagcttattccatggtcgccgccatggtgttattttttcactgttcttttccggaacataattcttatcggttcgcttaatccgctggaaatatatccacccacggcagggcgatatccgcgtcgttattgcattttagactcatcttatccatgatcgtggtaacacataccgcagtcgtacaggttttaatgcatatggaatggattgccgatccgtcaatctgggcaggtctcgtcacgctggtggttatcgaactggtgttaggtatcgataacctggtctttatcgctatcctcgccgagaagctccctcccgcccagcgcgaccgcgcgcggatcactggcctgatgctggcgatggtcatgcgtctcctgctgctggcttctatctcctggctggtcaccctgaccaaacctctgattgtttttcacgacttcagctttagcgcccgcgatttgattatgctgtttggcggcctgtttctgctgtttaaagcgaccgtcgagcttaatgagcggctggaggggaaagacagcgataaccccacccagcgcaaaggggcgaaattctgggccgtcgtggcgcagatcgtggtgctcgacgccatcttctcgcttgactcggtgatcaccgccgtcggcatggtcgatcacctggcggtgatgatggccgcggtggttatcgccatcagcctgatgctgatggccagcaaggcgctgacgcgcttcgttaacagccacccgaccatcgtgatactctgtctgagcttcctgctgatgatcggcttcagtctgattgctgaaggcttcagctttattattccgaaaggctatctatatgcggccattggcttctcggtcatgattgaagcgcttaaccagctggcgcagtttaaccgccgtcgcttcctctccgccaatatgacgctgcgtcagcgcactaccgaggcggtgatgaatctgctgagcgggcagaaagaaaaagctgaactggatgctgacacggcgtcgctggtcgccgatcaggatcaacatccactgtttaatccgcaggaaagactgatgattgagcgggtgctgaaccttaatcagcgcagcgtcagcagtattatgacgtcgcgccatgatatcgagcgcatcaacctcagcgcgccggaggaagagatccgcagcctggtggagaaaaatcagcatacccgtctggtggtcaccggcgggaaagataatgaagatctgctgggggtggtgcatgttattgacctgctccagcagtccctgcgtcaggagccgctggatctgcaggcgctggtgcgtcaaccgctggtcttcccggagggcctgccgctcctctcggcgctcgagcagttccgccaggcccgcacccattttgcctttgtggtcgatgagtttggttccgtcgaggggattgtgaccctcagcgacgtgatggagaccatcgccggcaatctgcccaatgaggtggaggagatcgatgcccggcacgatattcagcatcatcaggacggttcatggacggtcaatggccatatgccgctggaggacctggtgcagtacgttccgctgccgctggatgataaacgggagtaccacaccgtcgccggtctgctgatggagtatttgcagcatgtgccgcaggtgggggaaaccattgagattgacggttatacgctgcgcacgctgcaggtcgacagccatcgggtacagaaggtgcagatcgtcccgccggtaaagcaggatgagctggattatgaggtgtaatcgtcaggcataaaacggcccggggtatcccgggccgtaaaattgatagccaggtatcctgtttaatgcctgatggcgcttcgcttatcaggcctacgggatggcgaactaatcggggtatgacacccaccgtataatccaagccgggtcaggcgtagccgccacactgcctgatggcgctgcgcttatcaagcctacgggatggcgaactaatcggggtatgacacccaccgtataatccaggccgggtcaggcgtagccgccacactgcctgatggcgctgcgcttatcaggcctacgggatggcgaactaatcggggtatgacacccaccgtataatccaggccgggccaggcgtagccgccacactgcctgatggcgcttcgcttatcaggcctacattaagtggcgacgcaaacggatgatattgcgcacatcccaggccgggtcaggcgcagccgccacccggcatcattgtgacattacgctttgacgataaacacagcccggaaacttccgggccgcggtggtaggaattacagcttatcgagcagctttttggcatcgttgccgtctttgctgcctttattacgctcaacccagtcgttgaggcgctgcttcgcttcatcctgcagctgtttgcgcaggatctggtcgacctgcagactgtagctcagcgactgccactcgccgtagatgcgcagcgggatagcggtctgtttcaggcggtcgataagcttgccctcccctttccagccgccgagcacgcgcacgttgaagcgcatatcgcagttctctttctgcagatcgagctgtccttcgccggtcatcgccatcacgtcggactgcccctgcaggcggttcagcgtcaccagcccgttatccagcgtcagccggctgctcacggaatccaggcgggtggcattgtcgtaattttcctgcgcccgcacgttggtgctgcgctccacggcctgctgcaccagctgctggaagttcagcccttcggtgcgggtatcggccatctggagctgagcctgtccctgccagtggcgacggaaatcatcggcgtcaatgcgcgttccggaaaattcgccgctcagcgacagcttgccggtcaggtttaaggaatagttaaaggctttgatcagcgaaccgatctccacattctgcagcgccggctggaacgtcgccagcggcgtgtcgccgcgggcatccagggtgccagggagagagagctgcccgccatcaagattgccctgcattttgctgaccgtcagcagcccctgctggttgctgatttcgctctgcacctgggtgaagttcagaccgcgccactgcagctggtcggcgctcagggccattcggccgttgaagccgcgcaggctctggtaatcttcgcgctcatcgctgtcggcgatcaccgggcgcagcggtcgcgtctgactctggccctgctgactggcgctactgtccgtcgccggcgacctttgcgccagcagactatcgagatcgagagtggtggcgtgcaaatccagcgaccagtccgggcgatcccccagcaccacgctgccgctgccggtaacggtgctgcggttagccatcagattcaggttgtcaaaacgcagggtcttgtcatcttcctgccagctggcctgcagactcccctgaccattaatgccgtccggtgggagctcggcgccgcgcagctgccagctaagctgggtaaagtcggcttttaaggagtgcggataatcgccgccctgcacggtggcggagaagttcagcgccaggtcgcgctggtcgcggttcacccggccggagaaatccacggtggcccggtgattctcatcctgctccatctgcagacggatatcgcgcacggtcacctgctcgccgttctcgtgctggaagaagagcacgctgtcggccacctgcagctgacgcacatcgtaggaccatccgcgatcctccggggccagcggcagggtgttgtcatgcggcaccaccggcgctgagctgtcgcgaaccgcctcggttttcggggtcagctggatcaccgcgcccttgagcatcacctgcttaacctgcagctgatgcgagagcagcggcagcagcgccacgtcgaggcgcatattgtcggcgcggatcaccggctcttcggcgcctcgggcggtcagcgtcatccgtccgctgagaatgctgagctgcggccagacgtgccagcgcagcgggccatcaaggtcaagctgataaccgctgcgctctgccacctcatgcaccatataggcgcgaaaatcgttgggattgaccagcaataccaacgaggtaagcccggcgacaatgaccgccagcaggatcatcagcgttgtcagtattcgtctcatggcaccctcagcaacaccccgttgacgttatcaatccttgtcgattcggctcgccaccgcgccctgctggtcgcgatatttggcgtcttcacggcggttatacggccgggccgccgggcccgataacggttcaaagctcagcgcgccgatgggcatccccgggcgcagcgccagcggcaacttgccggagttgtaaaactcaagcacgatgcagccggaccagcctggatcgatacggtgcgcggtaacgtgcaccatcagccccaggcgcgccagcgaggagcgtccgtccagccagcctaccaggtcggcaggcagggtgacagactcgtaggtcaccgccagcgccagttcgcccggatgcaggaaaaaggcttccccttccggcaggacgatctcttcgctcatcacccggtccagcgcggcgctgacctcggccttcgggccgcttaaatcgataaacggcgccgtgtggccacggaaggtgcggaatttattacccagccgtacatcaaccgtcgcgccattaatacgctcaacgggcggacgcggattgatggcgagtcgcccttcatccaaccaggcttcgatatctcggtcacacagacgcatgggctttctccttataaggctgcttcccgcacgcttcgcggcggagagggcaacagggctactctttgcacgttacacaattcggccaggttattcaaagaactgactgattttggccttcagaatatcaatagcgatgcggtttttgccgccgcgcggcacgatgatgtcggcatactgcttcgacggttcaataaactgcaggaacatcgggcgcacggttttctgatactgggccatcaccgagtccatggagcggccgcgctcgttaacgtcgcgcttaatacggcgcatcaggcaaatatcgagaggggtgtcgacgaaaatagagaagttgagctcgttacgcaggcgcgcatcggtcagcagcaggatcccttcaaggataatcaccttcttcggctcgacgtgaatggtgttcggcgtgcgggtatgctcgacgtagctatagaccggcagttcaatcggctggccgcttttcagcatctgcaaatgctggaacaacagactgtggtccattgagctcgggtggtcatagttggttttgacgcgctcttccatcgacagatggctttgatctttgtaatagctgtcttccggaatgacgccaatatgttcgtcgccaacttgttcacgcaattcgcgatagagagtactggcgataagacttttgccagaagccgatgcgccggcgatgcctacaatgacgcactgatgggacatatcagtcataaatttttgcgacctgattaacctggatagagatggagggtggcggcggaccgccaaacgcggcaattatagggatttcagcgtcccgataccagtggtatgcgccccgggcggctattccgccgccggcgcccagtcatcggtataccagatatgcaacagcgcgtaggatcgcatcggctgccagcggcgggcatagcgggcgatggcggccggggtcattcccggaaagcgctgtttaatcaggtaatcatccggcaaaaagatatctttcgcctgccagccgcgcagggcaaagtagtttgccgtccagcggccaatcccgggcagggtctgcagttgacgcagcccggcgtcaatatccgccggcgccgtcaggggcagctcgccgctgagcgccgcccgggcgaggtggatcagcgcctccgcgcggcgcagcggcatccccagcgccttaagcgcctgcggatcggcccgggacagggcctctggcgtcgggaacaagacatatccaggcgcctctgcaagcggttcgccccagccagccgccactttggcggtgagccgggcggccatcgccacgctcaccagctggcccagcaccgcgcgcaccgcctgctcgaaggcatccagcgcccccggcaggcgcagccccggccgcgcctgcgccagatcgcccagcgtgcgagcgacctgccgcgggtcgcaggctaaatcaaacagctggccaattcgcgcatagcagatctccgctaccggctgcagtcccggggaaagagtcacccgcaggccctgcgcctcttcgtccggcgccagatgaatcagcccgcggtggccttccacgccaaagctgcggctgtagcccccatcgtgaaaacgctcgacgccggcgaccgcgcgcgcctgcagaaaaccaaccatccacgcccagtcatagggcggggtccagggtaacagcaccataagctctcctttatatagcgtttcaatgatagtcgcccttgaccatcagcgccttgcttttaaattccggttgtcggcatggcgacgatccgctaaagtcgccccccttcttcaccggcatggggattttgcagacgatgtttattggttttgactacggcaccgccaactgttcggtggccgtgatgcgggaaaataccccccagctgttaacgctggaaaacggcagcaccctgctgccctccatgctctgcgcgccgacgcgcgaagcggtcagcgagtggctctatcgccatcatgatgtccccacccacagcgacgaaaaccaggcgctgctgcgtcgggccatcgccgccaaccgcgacgaagacatcgaggtgctgcgcaacagcgtgcagttcggtctcgcctccctgcagcagtatgttgaagatccgcaagaggtctacttcgttaaatcgcccaaatccttcctcggcgccagcgggctgaagccgcagcaggtggccctgtttgaagacctggtctgcgccatgatgctgcatattaagttgcaggccgaaagccagctgcccgagcagatcgaccaggcggtgattggccggccgattaacttccagggcctcggcggcgatgaggcgaacgcccaggcgcaggggatccttgagcgggccgcccaccgcgccggtttccgcgatgtggtctttcagtttgaaccggtggccgccgggctcgatttcgaagcgaccctcagtgaagaaaagcgggtgctggtcgtcgatatcggcggcggaaccaccgactgctccctgctgctgatgggcccgcagtggcgggagcgcgccgaccgccagcagagcctgctcggccacagcggctgccgcatcggcggtaacgatctcgacattgccctggccttcaaatgcctgatgcccctcctcggcatgggcggcgaaacggagaaaggcaccgcgctgccgatcctcccgtggtggaacgcggttgcgatcaacgacgtgccggcgcagagcgatttctacagcactgccaacggccgcctgctgaacgatctgctacgcagcgcccgggatgccgacaaggtggctctactgctgaaggtctggcgccagcgtcttagctatcgtctggtgcgcagcgccgaagagagcaaaatcgccctctccagcgccgccagcgtcgaaaccgcgctgccgtttattcaggacgatctggccaccgccatcgcccagcagggtctggaagccgcgctggatcagcccctgacccgcattatggaacaggtgcggctcgcgctcgacagcagccagaccaccccggatgtgatctatcttaccggcggcagcgcccgttcgccgctgatcaaaaaggcgctggccgctcagctgccgggtattccgctggccggcggcgatgattttggctcggtgaccgccgggctggcccgctgggcgcaggtggttttccgctagccctcgcccggcgctgccgcgcagcaggtctgtcctgatcctggcgctgcagattacgctggaatattcctggtctcccacgcaaaatggcctgttcgtccggacaggcctgtccactcttccccatttcagggggcgtattatccataccgtagccagatgtctgcggtctgtatcgttggcttgccgcaagggggcgtgattgaaaagggtgtctgcgatcttcggggcggtccggcgttgccggccgcagttcctggcaggctggctgctcagctgtggattattcttgctgctggtcgccccacaggcgcaggcggcgacgcgccaggtgggcattgatattccggtccagtggtacgcggacgccagcggccagatgaccctcgatcgcttcgccgccctgcccacagaccagctcgccaccacccggcagatcccctcctttggttattcgcgaaaaacctggtggctgcgcagcgaactgccgggaacgtggtttgccggggagccgcgctggctgcagctgggcccctcttttgtcgaccatctgactatttactaccggcctctgggcagcgatgccccctgggcacagcgcacctttggcgaccgcgacggcgcccgcgagagcgacctgcactaccgcgaaagcgtgctgatcctccccccgccgccgaccgccgccggctatgaggtggtctttcgcctgcagagcaccagcaccctgatcctgctggcctcgctctcctctgcgcaggcgtttgtgcagcgggccaccgctgacaccgctttctggagcttctacttcggcctggccgctgtcgccagcggtgtggcgctttggctggcgctggccctgcgccggcgtctgctatggggcatctgtcttttctcgctcaattatccgctggtggccgctctgcacggcttcccggagtggttcttcggccacgccgcgctgcccttccaggattttatgatcagtagcctctcgctgttcagctatgccaccgccctctggctgcatagcgagatttttgatctgaagaagaatatgccgcgacttcatcagctgctgatcgccgccgtgatactcaacctggtactgcaggtcagtattccgctcgggttttacggcttcgcgatgcagattgaaggggtagtattcatcattatcaccccggtgctgctgttcacctcctggtggctgtggcgcaaaaaagctatcgaccgtaccaccctgctgctgggtctgctgccgccgttctatgtcgtcgccgcggtgctggtgcagttgtcgatccatgggattatcccgttccatatggcgatctattccctctggcagtacgcgctgatcgtccacatcattacggtgctgatcattgccattctgcgggtgcgtgctgaaaaccgccagctggagcagaagcagcgcctggcgcgcgaactgcagattgagcgtgaagccagcttccaccagcggcagtttatgggcatggtggcgcacgaattccgcaccccgctggcggtgatccaggcggcgctggagaatcttcgcctctcggcggcctcgaccagccaggaggcgcgcttcgatcgcattggccgcgccgccacccgcctggtgcagctcaccgataactgccttgccgacgcccggctcgcctcccacgatctgcacgtcgagcgccagcagaccgccctgctgacggtgatcaacatggccgcctcggtggtggccatctcccatgatcactacctgaacatccgccagcacggcgcggtggaaagcccgcagctgcaggccgatgccggcctgctgtgcatcgccatcgctaatctgctggataacgccgtcaagtattcgccccccggtgaaatcgccatcgatattcattccgatgccgggcaaacggagctacgcattcgcgaccacggcccgggactccccgccggacaggcggaactgatctttgagcgctaccgccgcggcgagcacacatcgccggtgccaggcggcaccggtctcggactgtatgttgcgcgtcagatagtgcaggctcatgatggcaaactgtggctggccgagcatggcccggacggctgcacctttattctcaccctccccacggttgcttaagaggagaacgacgtatggctttacggctggcgataattgaagataacgccgatctgctggatgaactgctggcctggctgggctatcgcggcttcgaggtgtgggggacgcgcagcgccgaagccttctggcggcaactgcacagccatccggtggatatcgtgctggttgatatcggcctgcccggcgaggatggcttcagcgtactgaactatctgcatgagctggggcactacggtctggtggtggtcagcgcccgcggtcagcaacaggataaactgcaggcgctgagccttggggccgatgcctatctgatcaaaccggtaaacttcgcccatcttgccgagaccctcaccgccctcggcgcgcgcctgcgccaggaccgtccggcggctccgcctgcggaggcgatcggcacgccgccggccgtctcccccggcagctggcgtctgcaagaggataaactgatttcacccgacgcccggacgctggaattaacccagcaggaatatcgcctggtggagctcctgatgcgcaatcgcaacgaagtgtgcagcaaactggatctccatgcctgcctgttttcccatgaaagcgagcctgacctgcaccggatcgacgtggtggttagccgcctgcgtcacaaggcacgccagcaggggatccacctgcccgttcgcgcaatctttggtaagggactggcctttatttcctgaacgacggggcgcgtcggcggccgtgcgggatataaaaaactcgtaagtgttaatttttctcattttctgagagaaatgagaggaatgagactgacgatgaccttaagaactttcttatagtactagcacatcaggatgatggcgtaagattttcacgggacagaaaagcatataacaaaacgtattagccgttcgcggcaaattctgacaccatgcaacacaatcagggtaaaaacgatggccatgcaaacgtggttagttttattgctatgcatttttttcttcagcatctctgtatacagttttatttcctatctgaaagacaggaggcggcagaaattgacttttaacgataagcgttcgatgcgtcgtaaataattcactttaaaataataaaaaattattgtaggtgcttttatatcttcaacacaccgcatacgcccggaggatttgtcacagcatggcgttatgttttgcgtaaggaaataacgccatgagaaacattaatgtcaccatcaacacccgcaacgcctttgtccgtgaatcgctggtggccatggtcaatgacctcacccggggcgatctgcgggcgcgtttttcctggcgtaacaccgatctgtcagctgaagatatcattatctgcgaagtgatccccggggaaatatacctgtgtaataccctgattaagaacagaaaaagaggaagctcgctgattatcctccatagctatgaccagctgccggaagatgagttcatgattaactgcctgaaaggggtcatttttgtttcgctaaaaacggccagtattccgcaattgctgacgatcattaaaagcgagcttcagcattgtatgacccccacggctaccgacgccgcaggccgggaactcagctgcgccagctgtccgcatcgcgtgttatcacgatcgcagaccgccgtagtgcacggtattctcgaagggctggatatgagtaaaatcgccgccctgcagcgtgtgagtccccgcaccgccgcctatcataagaataagatcatggaaaaatacagcctgaataataatcatgaatttttccagtttatgaatcttttacgagagcgctggtaggcaaagagcagcacaaaaaaataagatattgacctggctatattgtcggaaatccgaaaatagtcgcaggatgctaaaaaatatccagcgctggcggacataacgttaaactctgacgcttcctcggtataaagacgttaccgcccgtctttatataataaaaaacacgctacacgaggaaaactgatacttcgtcacattgcccctgacgtgcctgtcaggggtcttttttccgtgtggaatagcgccctcagtgaaagggcgcggcaggatcaggcttccgctttctccacttcccagtccggctgcgcttcctcgtcggtcagcaacccttcatttttcgacagcatcgcggtggcgatgccattacccagcacgttgatggcggagcgccccatgtcgaggaaatggtcgatacccatcagcagcaggatcccggcgaccggtatattgaagctggggatcgtcgccgccagcaccaccagcgccgaacgcggcaccccggcgatacctttcgaggccagcatcagggtcagcatcatgaccgtaatctcgctaaagctcagcggcacgttataggcctgggcgataaacatcgcggcgaaggagcagtagaccatcgagccaacgaggttgaacgagtagccaatcggcaggacgaacgagacgatattgcgcgaacagccaaacttcaccagtcgctcgagggtcttcggataagccgcttccgagctgctggtggtaaaggccaccagcaccggatctttcagcatgttcagcaggcggaaaacctcttttttcagcaccatatagccgacggcaattagcaccgcgctggtcaacagcaccgccaggtagtagccgccgatgaacgaagcatagttgagcaggatccccagcccctgggaggcaatcaccgacgagatggcggcgaagatggccagcggcgcaacgtacatcacatagcccgtcaccttcagcataatgtgcgacaccacgttaagggccgccaccagcggagcattaaacttctcccccagcgacgcgccggcgatgccgaagaacatcgagaacaccacgatctgcaggatctcgttgttggccatcgcctcggtgatgctggtggggatggtgtgcgacaggaacccttttaggctcatgccgctgaccgccaggccggtatccaccgcctctttcggcaccgccaggtttaacccggcgcccgggtgctggaaggtgacgatcaccagcccgacgagaatggataataccgaggaggtgatgaaccagaccatcgccttgccgcctacccggccgatggtcgccgtctcgccgaggcgcataatgccgaccgtcagggtgctgaacaccaacggcgcgatgaccattttgatcaaccgcagaaacagatcggtgagcagcgtgatattatccgcccaggcggaaacggtggttggcgtcgcgtaggcatggatagccgcgccggagaggatccccatcagcataaaaacgacgatgaagagcgtgagtttgtttgcgtttgccacagcaatgacccctgattatttaacacgttgatttttaagtgcatattttattattatgggaatgcactgatttattcaccgcataaatctaattaaagcccccgcggatacaactattttttgcttttttaaactaaaagttgatatcaccccggatatcggccgcgggagcgcccggcgtcgcggcggttatccagacatttctcaaccttcttttcataattcctccatttttacggccccttccctcactaaactagtatcattcagcgaaacgcttcaggatgagaccgtaaactaatgaaaggcagtaacatacgtcgttggggcgccgcgctggcggtagtgattatcgccggggccgcctactggttctggcacgatcgcgggacgagcggcagcggggctcccgccgccgggcagggcccgcaggggccgggcggcgcacgccatggccgctttggcgccgcgctggcgccggtgcaggcggccaccgccaccgaagaagcggtcccgcgctatctcaccgggctgggtacggtgacggcggccaacaccgtcaccgtccgcagccgggtcgacggccaactgctgagccttcacttccaggagggacagcaggtcaaagccggcgacctgctggcgcagatcgaccccagccagtttaaagtcgccctcgcccaggcgcagggtcagctggcgaaagatcaggccaccctcgccaacgcccgccgcgatctcgctcgttaccagcagctggtgaagaccaacctcgtctcccgccaggagctcgacactcagcagtcgctggtggtggaatccgccggcacggtgaaagctgatgaagcggccgtcgccagcgcccaactgcagctcgactggacccgcattaccgcgccaattgacggccgcgtcggcttaaagcaggtcgatatcggcaaccagatctccagcggggataccaccgggatcgtggtccttacccagacgcacccgatcgacgtggtctttaccctgccggaaagcagcatcgccacggtggtgcaggcgcagaaagcgggcaaagcgctcagcgtcgaagcctgggatcgcaccaataagcagaaaatcagcgtcggcgagctgctgagcctcgacaaccagatcgatgcgaccaccgggaccatcaagctgaaggcgcgctttagcaatctggacgacgcgctgttccccaatcagttcgttaacgcccgcctgctggtggacacccagcagaacgcggtggtgatccctgccgccgcgctgcagatgggcaacgaagggcatttcgtatgggtgctgaacgatgagaataaggtcagcaaacacagcgtgacgcccggcatccaggacagccagaaagtagtcatcagcgccgggctttccgccggagatcgcgtggtcaccgacgggattgaccgcctgaccgagggagcgaaggtggaagttgtcaccgccagcagcggcgagcaggcgcagcccgccccgcgccagagcggtaaacacggagcgcgttcctgatgcaggtgttacctccaggccgcaccggcggcccgtcccggctgtttattatgcgtccggtggccaccactctgctgatggtggctatcctgctggccgggatcatcggctaccgctttctgccggtctccgccctgccggaggtcgattacccgaccattcaggtagtcaccctctatccgggcgccagcccggacgtggtgacctccgccatcaccgccccgctggagcgccagttcggccagatgtccggcctcaagcagatgtcgtcgcaaagctctggcggcgcctcggtagtcacgctgcagttccagctgaccctgccgctggacgtcgccgagcaggaagtgcaggcggccattaacgccgccaccaacctgctgccgagcgatctgcccaacccgccggtctacagcaaggtgaacccggcggatccgccgatcatgaccctcgccgtcacctcctccgccatcccgatgacccaggttgaggacatggtggagacccgggtggcgcagaagatctcccaggtttccggcgtcggtctggtgaccctcgccggcggccagcgcccggcggtgcgggtgaagcttaacgcccaggccatcgccgccctcggcctgaccagcgaaaccgtgcgcaccgctatcaccagcgccaacgttaactccgcgaaaggcagcctcgacggcccggcccgcgcggtgacgctttccgctaacgatcagatgcagtccgctgaggattatcgccggctgattatcgcttatcagaacggggcgccgatccggctcggcgatgtcgccagcgtcgaacaaggggccgaaaacagctggctcggggcatgggccaaccagcagcgggccatcgtgatgaacgtccagcgccagccgggggccaacatcatcgacaccgccgacagcattcgccagatgctgccgcagctcaccgagagcctgccgaaatcggtgaaggtgcaggtcctctccgaccggaccaccaacatccgcgcctcggtgcgcgacacccagtttgagctgatgctggccatcgccctggtggtgatgatcatctacctgttcctgcgcaacgtgccggcgaccattattcccggcgtcgcggtgccgctgtcgctggtgggcactttcgcggtgatggtgttcctcgacttttcgatcaataacctgacgctgatggccctgaccatcgccaccggcttcgtggtggatgacgccatcgtggtgatcgagaacatctcgcgctatatcgaaaaaggcgagaagccgctggccgccgcgctgaagggcgcgggggagatcggcttcaccatcatctccctcaccttctcgctgatcgcggtgttgatcccgctgctgtttatgggcgatatcgtcggccgcctgttccgcgaattcgccgtcacccttgccgtcgctattcttatctcggcggtggtctccctgaccctgacgccgatgatgtgcgcccgcatgttaagccacgaatcgctgcgcaagcagaaccgattctcgcgggccagcgagcgtttcttcgaacgggtgatcgccgtctatggccgctggctgagccgggtgctgaaccatccgtggctgacgctcggcgtcgccctgagcaccctggcgctgtcgattatcctgtgggtctttatcccgaaaggctttttcccgatccaggataacggcattatccagggtaccctccaggcgccgcagtcggtctccttcgccagcatggccgagcgccagcggcaggtggccagcattatccttaaggatccggcggtggagagtctgacctccttcgtcggcgtcgacggcaccaacccggcgctgaacagcgcccgtctgcagatcaacctcaagccgctggacgaacgcgacgaccgcgtccagacggtgattagccgcctgcagcaggcggtggacggcgtccccggcgtggcgctctacctgcagccaacccaggacctgaccatcgacaccacggtgagccgcacccagtatcagttcaccctgcaggcaaactccctcgaggcgctgagcacctgggtgccgccgctgctcagccgcctgcaggcccagccgcagctggccgacgtcagcagcgactggcaggacaaaggcctggccgcctatatcaaggtggatcgcgacagcgccagccgcctcggtatctcaatggccgatgtcgataatgcgctgtacaacgccttcggccagcggctgatctccactatttacactcaggcgaatcagtatcgcgtggtgctcgagcaggataccgaggcgacgccgggcctggcggcgctggagaatatccgcctcaccagcagcgacggcggcatcgtgccgttgaccgccatcgccacggtggagcagcgctttaccccgctgtcggtgaaccacctcgatcagttcccggtgaccaccatctcgtttaacgtcccggacaactactcgctgggcgaagcggtggaggcgatcctcgccgccgaacagtcgctggatttcccgaccgatattcgcacccagttccagggcagctcgctggccttccagtcggcgctcggcagcaccgtctggctggtggtcgccgcggtggtggcgatgtatatcgtgctgggggtgctgtacgagagctttatccacccgatcacgattctctccaccctgcccaccgccggggtcggggcgctgctggcgctgtggctggcgggcagcgagctggacgtgatcgccatcatcggcatcattctgctgatcggcatcgtgaagaagaacgccatcatgatgatcgacttcgcgctggccgctgagcgcgagcagggcatgccgccgcgggaggcgatctaccaggcctgtctgctgcgttttcggccgatcctgatgactaccctcgccgccctgctcggcgccctgccgctgatgctgagcaccggcgtcggcgccgagctgcggcgtccgctggggatcggcatggtcggcggtctgatgctcagccaggtgctgaccctgttcaccaccccggtgatctatctgctgttcgaccgcctgtcgctgcacctgaagcgccgcttcccgcgtcaggaagaggaggcgtaagtgaagtttttcgccctcttcatttaccgcccggtggcgacgatcctcatctcgctggccatcaccctgtgcggcattctcggcttccggctgctgccggtagccccgctgccgcaggtggacttcccggtgatcatggttagcgcctcgctgccgggagcctcgccggagaccatggcctcgtcggtggccaccccgctggagcgctccctggggcggattgccggggtcaatgagatgacctcctccagctcgctcggcagcacccgcatcattctcgagtttaacttcgaccgcgatatcaacggcgcggcgcgcgacgttcaggcggcgatcaacgccgcgcaaagcctgctgccgagcggaatgcccagccggccgacctatcgcaaagccaatccgtcggatgcgccgatcatgatcctgacgctgacctcggacacctactcccagggtgagctgtatgatttcgcctccacccagctggcgcagaccatcgcgcagatcgacggcgtgggcgatgtcgacgtcggcggcagctccctgccggcggtgcgcgtcgacctcaacccgcaggcgctgttcaaccagggcgtgtcgctggacgcggtgcgcaccgccatcagcgacgccaacgtgcgcaaaccgcagggggcgctggaggacagcgcgcaccgctggcaggtgcagaccaacgatgagctgaagaccgccgccgactatcagccgctgatcgtccactaccagaatggcgccgcggtgcggctgggagatgtcgccaccgtctcggattcggtgcaggacgtacgcaacgccgggatgaccaacgccaaaccggcgatcctgctgatgatccgcaaactgccggaagccaatattatccagacggtggacagcatccgcgcccgcctgccggagctgcagcagaccattccggcggctatcgacctgcagatcgcccaggaccgctcgccgaccatccgcgcctcgctggaggaggtggagcagacgctggtgatttcggtggcgctggtgatcctcgtggtgttcctgttcctgcgctcggggcgcgccacgctgatcccggccgtcgccgtcccggtttccttaatcggcaccttcgccgcgatgtatttgtgcggcttcagcctcaataacctgtctctgatggccctgaccatcgccaccggcttcgtggtggatgacgctatcgtggtgctggagaatatctcccgccatctggaggcagggatgaaaccgctgcaggcggcgctgcaggggagccgcgaggtcggctttaccgtgctgtcgatgagcctgtcgctggtggcggtgttcctgccgctgctgctgatgggcggcctgcccggccgcctgctgcgcgagttcgccgtcaccctgtcggtggcgatcggcatctcgctggcggtctccctcaccctgacgccgatgatgtgcggctggctgctgaaaagcggcaagccccaccagccgacgcgcaaccgcggctttggccgcctgctggtggccgtgcagggcggctatggtaaatcgttaaaatgggtgctgaagcatagccgcctgaccggcctggtggtgctgggcaccatcgccctcagcgtctggctctacatttcgatcccgaaaaccttcttcccggagcaggacaccggggtgctgatgggcggcattcaggccgaccagagcatctccttccaggcgatgcgcggcaagctgcaggactttatgaagatcattcgcgaagatccggcggtggataacgtcaccggctttaccggcggctcgcgggtcaacagcgggatgatgtttatcaccctcaagccgcgcgaccagcgccacgagacggcgcaacaggtgatcgaccggctgcgcaaaaagctggccaacgagcccggggccaacctgttcctgatggcggtgcaggatatccgcgtcggcggccggcagtcgaacgccagctatcagtacaccctgctgtccgacgacctgtcggcgctgcgcgagtgggagccgaagatccgcaaagcgctggcggcgctgccggagctggcggacgtcaactcggatcagcaggacaatggcgccgaaatggacctggtctatgaccgggataccatgtcgcgcctcggcatcagcgtccaggacgccaacaacctgctgaacaacgcctttggccagcggcagatctctaccatctaccagccgctcaaccagtataaggtggtgatggaggtggatccggcctacacccaggacgtcagcgccctggataagatgttcgtcattaacagcgacggcaagccgatcccgctggcctacttcgccaaatggcagccggccaatgccccgctgtcggtgaaccaccaggggctgtcggcggcatccactatctcctttaacctgcccaccggccgctcactgtcggaagccagcgaggccattgaccgcgcgatgacccagctcggggtgccgtcgagcgtgcgcggctcctttgccggtaccgctcaggtgttccagcagaccatgaacgcgcaggtgatcctgatcctcgcagctatcgccacggtctatatcgtgctgggggtgctatatgagagctatgtgcatccgttgaccatcctctcgacgctgccctccgccggggtgggcgctctgctggcgctggagatcttcgatgccccgttcagcctaatcgccctgattgggattatgttattaattggcatcgttaagaaaaacgccatcatgatggttgattttgccctggaggcgcagcgtaacggcaacctgacgccggaagaggcgattttccaggcctgcctgctgcgtttccggccgattatgatgaccaccctcgctgcgctgttcggcgccctgccgctggtgctctccgggggcgatggctctgagctgcgccagccgctggggatcaccatcgtcggcggtctggtgatgagccagctgttaacgctctacaccacgccggtggtctatcttttctttgaccgtctgcggctgcgtttttcgcgtcactcctctcaaccggtaagcgaataacatgacagacctcccggccagcgtgcgctggcagctatggatagtggcgttcggcttctttatgcagtcgctggacaccaccatcgttaataccgccctcccctcgatggccaaaagcctcggggagagtccgctgcatatgcatatgattatcgtctcctatgtgttaacggtggcggtgatgctgccggccagcggctggctggccgaccgggtcggggtgcgcaatatcttcttcaccgccatcgtgctgtttaccgccggatcgctgttttgcgcccaggccagcaccctcgaccagctggtgatggcgcgggtgctgcagggggtcggcggcgcgatgatggtgccggtcggccgcctgacggtgatgaagatcgtcccgcgcgatcagtatatggcggcgatgaccttcgtcaccctgccgggccaggtcggcccgctgctcggcccggcgctgggcggggtgctggtggagtacgcctcctggcactggatcttcctcatcaatatcccggtggggatcgtcggcgcgatcgccaccctctgcctgatgcccaactacaccatgcagacccggcgcttcgatctctccggctttctgctgctggccgccgggatggcgaccctgaccctggcgctcgacggccagaaagggctcggcatttcccctgcctggctggcggggctggtggccgtcggcctctgcgccctgctgctctacctgtggcacgcccgcggtaacgcccgggcgttgtttagccttaacctgtttcgcaaccgcaccttctccctcggcctcggcggcagcttcgccggacgcatcggcagcggcatgctgccgtttatgaccccggtgtttctgcagatcggcctcggcttctccccctttcacgccgggctgatgatgatcccgatggtgctcggcagcatgggcatgaagcggatcgtggtccaggtggtcaaccgctttggctaccgtcgggtgctggtcgccagcaccctgggcctggcggcggtcagcctgctgtttatgtttagcgccctggccgggtggtattacgtgctgccgctggtcctgtttctgcaggggatgatcaacgccagccgcttctcctcaatgaataccctgacgctgaaagatctcccggacgatctggccagcagcggcaacagcctgctgtcgatggtgatgcagctgtcgatgagtatcggcgtgaccatcgccgggctgctgctggggctgtatggccagcagcatatgagtctcgacgccgccagcacccatcaggtctttctctacacctatctgagcatggcggcgatcatcgccctcccggcgctcatcttttccagggtaccggatgacgtcggcagcaataccgtcctccgtcgacgcaacaggagtggatcgtgaaattatggcgcccgggtattaccggcaagctgttcctcgctatattcgccacctgcatcgtgctgctgatcagcatgcactgggcggtgcgcattagttttgaacgcgggtttatcgactatatcaagcgcggcaatgagcagcgcttaaccatgctcagcgacgcgctgagcgagcagtatgcccagcatggcagctgggcgtttctgcgcaacaatgaccgctttatcttccagctgctgcgcaccttcgaacgggataacgacgaccgctcgccgccggggcacgccatgaagccggacaccgccccgaacgggccgccgccggatggcccccctgacggcccgcgtccgaggccggaaatgccgccccacggctggcgcaccatgttctgggtggtggatcagtcggggcgcgtgctggtggggccgcgtgagcgcgtcccggaggacggcacccagcgcagcatcgtggtcaacggcgcggaggtgggcaaagtgatcgcctcgccggtagagcggctgacgcgcaataccgacattaacttcgaccggcagcaaaagcgcaccagctggctgattgtcgcccttgccaccctgcttgccgcgctggccactttcccgttggcccgcggtctgctggcgccggtgaagcggctggtggaaggcacccataagctggcggcaggcgacttttccacccgcgtgacggtgaccggcggcgatgagctcggccgcctggcgcaggattttaaccagctcgccagcaccctggagcgcaaccagcagatgcgtcgcgatctgatggccgatatctcccatgagctgcgtaccccgctggcggtgctgcgcggcgagctggaggcgattcaggacggggtccggcgctttacccccgagtcgattccttctctgcaggccgaggtggctaccctcaccaagctggtggacgacctccatcagctgtcgatgtccgacgagggggcgctggcctaccagaaaacctcactggatatcatcaccctgctggaagtggcggcgggcgcttttcgcgagcgcttcgccagccggcagctaagcattcaggtgtcgctcccggagcaggcgatgatcttcggcgaccgcgaccgcctgatgcagctcttcaacaatctgctggagaacagcctgcgctataccgacagcggcggcagcctgcacattaccgcccgccgcagcggtcgcatgctggtgattgtcttcgccgacagcgcccccggcgtcagcgatgagcagctggcccgcctgtgcgaacgcttttaccgggcggaaggatcgcgcaaccgcgccagcggcggctccggcctcggactggcgatttgcctcaatatcgtagcggcccacggcggcaccctgcgtgccgaccattcgccttttggcggggttagcattaaagttgagttacctctggaacatgatttaccgagagacgtatgactgaattgcctgtagatgaaaacaccccacgcatccttatcgtggaagatgaaccgaagctcggccaactgctgattgattatctgcaggccgccggctatgcgcctgcgttgattaaccacggcgacaaggtcctgccctacgtccgccagacgccgccgcacctgatcctgctggatctgatgctgcccggtaccgacggtctgacgctgtgccgggaaattcgccgcttctccgatgttccggtggtgatggtgacggcgaaaatcgaagagatcgaccgtttgctggggctggaaataggcgccgacgactatatctgcaagccctacagcccgcgggaagtggtcgcccgggtaaaaaccatcctccgccgctgcaagccgcagcgcgatctgcaggcgctggacgcccggagcccgctgattgtcgacgaaagtcgttttcaggcctcctggcgcgacaagctgctggacctcactcccgccgagttccggctgctgaaaaccctctcccaggagccgggcaaagtgttctcccgcgaacagctactcaaccatctgtatgacgattatcgggtagtcaccgatcgcaccatcgacagccacatcaagaacctgcggcgcaagctggaggcgctggacgccgagcagtcgtttatccgcgcggtgtatggcgttggctaccgctgggaagcggacgcctgccggctggcgtagttagccttttcccggctcgcgctgcgcttcgccgggctacacgttcaccgccatctgcaatccgtagcccgggtaaggcgtttacgccgcaacccggggaactccctagagcctatcccaccaggcgttattaacgctgtcagtgtgagcactgcccaggttcaaaatggcaaacaaattagccatactgaaagatacctatctgatatttactccccttcgccgcggcgctacaatgcccgcccttaatgtggggacactccccaactcgccgcaccaggtgcggcgaatctgacctgtcatcagaacgagaacaccatgtttaaaccagaactcctctccccggcgggaacgctgaagaatatgcgttacgctttcgcctatggcgccgatgccgtttatgccggccagccgcgctactcgctgcgcgtgcgtaacaacgaattcaatcacgaaaatctgcagctcggcatcaatgaagcccacgcgctgggtaaaaaattctatgtggtggtcaacatcgccccgcataacgccaagctgaaaacgtttattcgcgatctgaagccggtggtggagatgggtccggacgcgctgatcatgtccgatccgggtttaatcatgctggtgcgggaacacttcccggagatgccgatccatctttcagtgcaggccaacgccgtcaactgggcgacggtcaaattctggcagcagatggggctcacccgcgtgatcctgtcgcgtgaactgtcgctggatgaaatcgaagagattcgccgccaggtgccggagatggagattgagattttcgtccacggcgcgctgtgcatggcctactccggccgctgcctgctctccgggtatatcaacaagcgcgacccgaaccaggggacctgcaccaacgcctgccgctgggaatacaacgtggcggaaggcaaagaggacgacgtcggcaacatcgtccacaaatatgagccgatcccggtgcagaccgtggagcctaccctcggcatcggcgcgccgaccgataaagtctttatgattgaggaagccaaacgtccgggcgaatacatgaccgcctttgaggacgaacacggcacctacatcatgaactcgaaagatctgcgggctatcgcccacgttgagcgtctgacccagatgggcgttcactcgctgaagatcgaaggccgcaccaaatccttctactactgcgcgcgcaccgctcaggtttaccgcaaggcgatcgacgatgccgccgccggcaaaccgttcgataccagcctgctggagaccctggaggggctggcccaccgcgggtacaccgaaggcttcctgcgccgccatacccatgacgattatcagaactacgagtacggctactccgtctccgagcgccagcagtttgtcggcgaattcaccggagagcgtaacggcccgctggcggccgtggcggtcaaaaataagttcagcgtcggcgacagccttgagctgatgaccccgcagggtaacgtcaacttcacccttgagcatatggagaatggcaaaggcgaaaccatgccggtggccccgggcgatggctataccgtctggttgcctgtgccggacgacctgcccctgcagtatgccctgctgatgcgcaactttactggtcaaacaaccagaaatccgcacggtaactagttaatttgcgttattttttcacgatgtaaggatattagaatcggatcacataccgtttcgatcgaaacaggtatcatccatttcgctgaaaaacataacccataaatgctagttgtaccaggaaccacctccttagcctgcgtaatctcccttacgcgggcttatttttttgcctctcctccggtcttcgctttcgtcatgcggtacactttatgcaacattgagcaataaaggttcccttgatgatgtctacgtttcctgccagcttactgatccttaacggcaaaggtgccaatgaaccgcagctacgcgaagcggttaacctgttacgcgatgaagggattgatattcacgtccgcgtgacctgggaaaagggcgatgccgctcggtttatcgatgaagccctgcagctgaacgttgaaacggtgatcgccggcggtggcgatggcaccattaatgaagtggcgaccgcgctggtggagcgcggcggcaagatggcgctggggattttaccgctgggcacggctaacgactttgccaccagcgtcggtatcccgcaggatctggccagcgccctcaagctggcgatcgtcggccgcgatgtgccgatagatatcgcccgggtgaatgataaaaccggctttattaatatggcgaccggcgggttcggcacccggatcaccaccgaaacgccggaaaaactcaaggccgcgctcggcggtgtctcttatttaatccacggtctgatgcgcatggataccctgaagccggaccgctgcgagatccgcggggagaactttcactggcagggcgatgcgctggtcatcggcatcggcaatggccgccaggccggcggcggccagcagctgtgcccggaggcgttgattaacgatggtctgctgcatctgcgcattttcaccggcgaagagctgatccctgccctgttcagcaccctggcgaatccggaaaactcgccgaatattgttgacggtgtctcctcgtggtttgaaataaccgcgccccatgagatgacctttaacctcgacggcgagccgctcagcggaaaaaccttccgtatggagctgttaccggcggccctgcgctgccggctgccgcccgactgcccgctgctacgctgatcaggcttcgcaaagcaaagacggtgcccggctggtatacagcagccgggttcgttgattgagcctctgaatgttaaggtaaaacggcacctgcggctgcaggaaaaacctgggcaggatatcgatccaagcaccgcgcttacattaatagacgatacccacaaccacaaaaaacctataacatcaaatagttacccattaaaatgggcgcatctgccgtgagacaatgcgccataaagcttagtattccgccacctcgcgcgccatttcgcgcgtatattgccgactggcgttaaccagcatctgcgtataggccgtctgcgcctggccgctgaccagcgcatcgaccgtcagggtttcgaggatcttcccgtactgcatcaccgccactttctggcataagtgggcaataaccccaagatcgtgggtgaccatcaggtaagtgagcttagcctcccgctgcagttccgccagcaggttaaggatctcagcctgcaccgacacatccagcgccgacgtcggctcatccagcagcagcacctgaggctcaagaatcagcgctctggctatcgccacgcgctgccgctgcccgccggagagctgatgcggatagcgctcgcgaaaggcgcggttgaggccaactttatccagtagcacattgatccgccggtcgcggtcgttgatacgatggatctgcagcggctcttcgaggatatcgccaatggtgtgacggggatgcagcgatccgtaggggtcctgaaataccatctgcacctgacggcagcgctcgcggctaatttcatgccctaagggctgagcatcgatggtcagttccccctgccagtgggtaaacagccccgccaggcacttgagcaccgtcgttttaccggaaccggactctcctaccagaccgtagatctcgccgggcttaacgtggaaactgacgtcatacagcacctggttacgcttctccccctcgccaaacgcgaggttgagatgttgaacttcaatcattatccgctccttaatccgttaaccagctggcctgacgctgcagcaccggcagtatcgggcgacgatgctgcatatccggcagcgagttaatcaatccctgagtgtaggggtgacgggcgtgatcgagatctttagcggcgatggactccactacccgtccggcgtacatcaccagcacccggtcgcagaagctgcgcaccaggttgatatcgtggctgataaaaatcagccccagcccgcgcgactgaaccaggtcatccagcaggcccagcacctgcaggcgcaccgacacgtccagcgcggaggtgggctcatcggcaatgatcagctccgggtcggtaatcagcatcatggcgatcatgatgcgctgtccctgtccgccggatatttcatgcggataaagctgataaacgcgctccggctggcgaatacgcaccacctccagcatctccagcgccctggctttcgcctcatctttgcgcccgggatgatgagtaagccaggcctcggcgatttgcttacccacgcagaccaccggattcagcgaatatttcggatcctgcataatcatcgagatacgtttgccgcgtacgccgcgcatctgcgcttcgctaagatgctgcagatcgaggtcggcaaactgcatccggctggcgctgacgcgggcctttttcggatgcagctgcagcagcgcgcgcccaacggtggacttacccgaaccggactcgccgacaatagccagcttctcatgccccagctggaaggagacgccgcgcacggcgtgggtcaccgcgctaccgttaacaaagtcgacgcacaaatcgcgcacgtcgagcagcggtgcattattcactacggggatcgaggatgtcacgtaggccatctcctaagaagttgaacgctaagctattgatcaaaatcgccagccccggaatggttacgacccaccagcactccatcatataagtgcgcccgctggagatcatcgctccccactccggctctggcggctgcgcgccgaggccgagaaagcctaggccggccgcggtcagaatgatcccggccatattcatggtgatacggataatgaccgagggcagacacagcggcacgatatggcgccagaggacgcgggccgatgaagcgccctgcagacgcacggcggagataaaatcagcctggcgcagagagagcgtttcggcgcgcgccagacgggcaatcggcggccaggcggtcagcgtgatggcgataaccacgtgctccagccccggtcctaaagcggcgacaaacgccagcgccaggaccagactcgggaaggagatgaaaatatcggtgacgcgcatcagcaccatatcgactttaccgccgaaatagccggcgctgacgcccagcagcagtccgagcggaccgacagtcaccgagaccagcagcacgatatagagcgtgatgcgggagccgtacaccaggcgactaaagatatcccggccaaactcatcggtgccgaaccagtgctgcgcattcggcgcgaccagcgcactattcaggtcctgtaccagcgggttataaggcgcaatcagcggcgcgaaaatcgccaccaccagcagcataaagataattcctccgccgatggccgtgagcggattgcgcgccattttgccgataaacccgacggtccgcgccgccgcgcgttgcagccgctgacggccttcgcccgcaccacccgaaagcggcgaatccagagaaacggtcatgattttgtcctcgggtcaaagaattgatacagcatgtcggagagcaggttgagcatcacgaagatcacccccaccagcagcacgcagcccatcaccgcattcatatcgcccagcagcaagcttccggtaaggtaggagccaaaccccggccatgagaagacggtttcaatcagcaccgcgccttccagcagcgcgccgtaggccagcgccaccaccgtcagcagttgcacgaggatgttacgaaacgcatggttccagataacctggcgctcggtcagccctttcacccgggcggtaataatgaactcctgcgacagctgggccagcataaagctgcgggtcatacggctgatataagccagcgagtgaaaacccagcagcgaggcgggaagaatcagatgattaatggcgttccagaacacctggccgttgccggccagcagcgcatcaacggtgatcagcccggtgcggcgcggcaccacaccatccagcccgagatctaccctcccggcgccgcctacccagccaagccaggcatagaacaccagcagccccatcatcccgacccagaagatcggcgtcgagtagcccgccaggctgataatgcgtaccacataatcggagacgctattgcgccgcgccgccgccaacacgcccagcggaataccaagacccgcgccgacaataatcgccatcgttgccagctccatggtggccgggaagacgcggataatatcgtccaccaccggtttcccggtcagcagcgcgttgcccagatcgccgtgcaacaggttgacgaaatagatgccaaactgggtggtcagcgatttatcaaaccccagctgctggtaaacctgctgataggtactctggtcagcatccgggccgacaatcgccagcaccgggtcgatgggcatgacgcggccaatggtaaaggtcagcagcagcaggccgaacagtgtaatcaccacctgcagtagccgttttgataagcgccggccgcgtgagccgggcgcaaggattgcggtactcatcctttctctccttcgcggactttatagacgtcacgcagaaaagtggtggcggaggggtgcggctgatactcccgtacctcgttgcgcacgacgaccgaatcaaccatctgcgaaagcggaattaaagccggaaccagctggtcgtagcgtgtctggatggcctggtagtcagccacctgtttttgcggatcgcgttccagcagggcctggtcaatcatcgtattcagttgcgggtcgtaaaaaccggtacgccagccctggaagttggtcagacgcgccttatcgctgttatccgggttatagaccagcgcgcgcaggctggaatgcggatgcggctccatcccgctgccgccgcgacctaccagcaggtcaaatttacgctcgcgcattgcgccgtagatctggttaccagtgccggtgatgattttggcgttaatccccgcctgcatcagcgtcgactgcacggcgatagcgatgttaagaaatggctgatcggagagtacccgcagcgtggtatcaaagccgttgggatatcccgcttccgccagcagctttttcgcccgcgccacgtccagcctgtagccgggatcgggtagcgtggacggcattcccgctttgataggccgctggtgcagcacgccgtagcccggcatcagcgctttattgataccctggtaatcaatcagatagcgcaccgcctcgcgcactttcggattggcgaagtgcgcctctttcatgctcatcgccacgtagtacatggtgccgcgctgcaccgcatcgacggtcagctgcggatcgctgcgcagggcgttgatatcggaaaccgccatattgttggcaatatcaaggtcgcctttttcgatcatcaggcgcagagtttgcgactcctggaaatgacgcagtaccacgcggctcattttcgcctcgccgcgccagtagtcagggttgcgcttcatgcgcagcacatctttcgcctgccaggtttcgaggataaacggcccggaaccggcttcatgggtggttagccagcggttaccccagtcgttatcctgctgatggctttgcaccgttttactgtccagcactccgaggttgcccagcgccgccagcgagtaaatcaccagctgcggatcgttatctttgggtaatacgatttgcaccgtgaagcggtccggcgcgctgacctggctgtcgatatttttcttactgaagccataggatttccatactgaggcctgggccaggttgaggtgcaggatgcgccgcattgaccacacgacgtcgacggcggtcagcgggttgccggagtgaaacttaacgtcatcccgcagatgaaaggtcagggttttgccgtcggggctgatatcccaggatttcgccagcgcgggcctgacggtggtgagctgctcagggtcaagctccaccagcgagtcgtagaggttgaccacgatccccaccacttcgttaccggtcatcgccgccgggtcaagggtgagcaggttattcatattcatgccgatgatcagctggtcgggcggcgttttcgccaccgcctccccgctccccatcgacatggcgagcgcgagaatacacgctcccagtaaggaggtttttttcatatctctgtttgcctgtactgtagggtacatgttgccggatggcggcattttcggcttatccggtctaccgggccgcaggctcgataagcgtagcgccatcgggtatttatttttttaaatcagtcgtggctaacggtattggcttcgatatacgcaaaattaatgtcttcaccgagacccggacgttgtgacaaatgcacaaatccctggtcatccatcgggtcgacaatgctgttgagataggccgccggttcatcgtagtcgaggaacggatgcagcaggccgcgctcgtaccagcggcagttgcggatcgcgcccaccaccgccaggcttgccgctccgttgccgtggacttcgcaatccatgccgaaagattccgccagcgccgccaccttcatggtcggtgtaatcccccccacgccgttagcgccggcgcgcagaatgtcgcaggccccggctttcacccattcggcgcgcatgtggtgcttgccgccgaagctctccggcccgacgatgggaatcgacaggttttccgccagccacgcataggaagacatcgaatcctcctccatcggctcttcaaaccaggcgaaattgagtttttccagctctttgccgatccacagcgcctcggcgcggctgtaccagtgatagccatcaatcatcaggtcaatatccggccctacggcttcgcgcaccgccgcgcaggctttaatgtccattttgggattgggcgcaaaagagattggcggcatccaggtgtgcagtttgatggccttgtagccgcgggcgaccagcttctcagcaaaagcggcatactcttccggggtcgacaggccgcccggtagatcgtcgccgcacatggtgctaccgtaagccgggacggtgtcgcgatagccgccaagcagcttgtagaccggcatcctgaggctgcggccaatcaggtcccacagcgcttgttcaacaaacgacagcgcgcgctccgttagctgatgtgcgctgccgcgctgccagtggttaagatcctgccagatacgctcgcggttaaacgggtcctgccccaccagcactttgcgaaaaaaagtattcaccacgaacgggcgcacgacttccggaggcgcaaacgaaaaaccctgcgccccatcatcagcggtgatggtcagcatcgccattttggccatgctttcagcccccggatgggagtgcccggcgctgtcggaaacccgacgagtgggatactggaaaacggtgacattcacagattcaattttcatgctcaatccttatcacggccaaatccgatcgacagaggtaaatcggcaaagcggtttcacattattgaaaatacgtttcaatatataatctaagcacaattacgtagcagtgcctcggacaaacaccgctaagcaaggccataaatttgggcattggcacaacaagacgtgactgttttcacaaaagatgagcgaaatgtgaggcggatcggcatggagaaaaaagggcgtgagcgcagaaaagagagtgaccgaccgtgtacatcccgggattttctgcgctcacgaaagcgtaagttatgcgaccgtcgctggctcggcgttaagcgcttccagcagttcaggtaaggtttgatagcggccgacagcggcctgatagcgcccctgtcggctatcttcggcaaccaccgccgtgggaataccggcggcctgagccgcgcaaaaaccgttgtaactatcctcaatcaccagacactggctggcgttgagattgagcttgcgcagcgtcgtcaggtacaccgccgggtgcggtttgccgcgtggttcatcatccgcgctgcaaaccacgtcgaaaaagtgccagagcgagagcttgttcagcacagcggcaataacctggcgggatgatgacgtggcgagcgcaatttgatagcccgcctcgcgaaaatagcgtaacgcctcatgcacgccgtgcatcggctcgccttcgttggcgatcaggccggtaatacgctgcaatatcgcggcttcaagccgctgcgggtcgagatcaagctgaaaatagcggcaccaggtgccggcaatgtcgtcgaggcgcttgcccttggtcagggtttcacattcagcaacgctcgccgttgccccccactgcgcgagggcgtcaatctgcgcctgacgccacagcgcctcggaatcaataatcacgccatccatgtcaaaaataaccgcctgcatactcattcgttcacctcattaaggctggcatgaagcgcatgccagccgcagtacctatgagaattcaacctgctcgcgggcggttgcttccttgtgggagaaccccggctgctccacgcggataaaggcgcagaggaaaaaggccaccacgtacaatgcggtataggcgatcaccaccccgatggtgctgaagaacggcagcagcaccacggcaatcgccggtgcgagaaagttcgacatccccgccgacaggttatagaccgaaatggccgcacctttatgcttcggctccagcgccgggaacacggccgccagcggcacgaaggcggcgacaaagatcccgagggcgatggcggggatcagcgccatcgcaaagctatggccaaagtgctgaggaatgtagtaaaacgccaggctggagagcgccatcccgatgcagccgaaccagcgcaccaccttcatccagcccagtttttccccgaggatcccccacagcacgttagagaaaatggtggtgaagaagaagactgcccatacctggagccattctgaagtgctgaaacccagctcatcgacaaacatcatcggcataatcaccgcaaagccgaacagcgagagggtattgataatcctcaccatgctcgacagcagaatattgcggttggtatagagcagcgtcgcggcgcgtcccagctcggaaaacttctcacgggtggtgagattctgcatatgctgcggcgtttgaatatggcgcagggaaaccagggcaatcacgcccccggtaaggcagaaggccagcgccagccacagggtgcccatttcgccaatgtgcggaatggtaaagctcggaatatagctgccgaagaccccgatgccgatggaatacaccgcccagaaccagccgatggccgagctggcgttgtcgcttttgacgttatggacaatcgccacgataaacgagtagaggaacagcggataggcgaagccgcggatgccgtagaaaagcaggatcagcgcatagttggcgtgaccgaggccgaaaacgaggaacagcacgtggaatacgcaccacagcacgaagccaatcatcatcgttttcagcggggtgataatttccgccaccaccccggaaatccacgccgacagcgcggcggccaggccgtagagggtaaaggcaaaggaggcctccgccggagagaagccgagggctttgatatagtgcgacagaaaggctaattcaaaaccgtcgccggtcataaatacggcaatggcgatgtatccccagagcaggttcaggggtaaaccgagccactgtttattattgatagacataatgacctcgttttcagggtacagggtggccgctccgcgacgtgcaacgaagcggcggttatgatgaaaatcagtgctgtcgatagtgcagatcgtttaaatacagggctttaaactgcgcgtagcgttgcatcagggtgtggtggcgaacaggatccgcacgccaggtctgccagacttccggtttttcacacaccgcggcaaccggtttgcccgccgccaggcaggccagccgcgccgcgcccagcgcgccgccggtctctccgcctttgtgggtcaccaccggcatagcgagaatatcggccagcagctgggcccagaacggactgcgggcgcccccgcccaccagcgagcactgcgcgatcggcgtcccgctctctttcaatgcctgcaggccgtcgttgatcccaaagctcaccccctccagcaccgcgtagccgagctgcgcgcgcaggctggcgtgggtcatgccccagaagatgccgcgcgcgtcaggatcgttatgcggggttcgttccccggagagataaggcaggaagaacggcgcgttggctttatcctcctcgcttagctcggcaatctccgccagcagcgccacctccgtggtgccggtcagacggcagaaccactgcaaacagctggcggcgctcagcatgacgctcatctggtgccacaggttcggcagcacgtgacaaaacgcatgtaccgccgactgcggcgccggacgataggcgtcggtcaccacaaacagcaccccggaggtgccgagcgaaataaacgcatcccccggcgaaaccgcgccgacgccaatggcgctgaccgcgttatcccccccgcccccggccaccaccaccgaggcgttcagcccccagcgggcagccacctgcgggtcaagggtggcggaaacctcgcagccttcgaccagcgtcggcatttggctgcgtgacaggccgcacttgtccagcagagcgtcggaccagtcgcgcttcgccacgtccagccacagcgtcccggcggcgtccgacatatcggagactttcttcccggtcatccggtagcgcagataatccttgggcaacagcaccgtggcggtgcgctgaaagtgctgcggctcatgacggcgcacccacaacagcttcggcgcggtaaagcccggcatcgccaggttgcccgccacctgatgcagctccggcgccatcgcctccagctcggcgcactctgcggcgcagcgggtgtcgttccacagaatggccggacggatcgcctccccctctgcatccagcaacaccgcgccgtgcatctgcccggagaggccaatcgccttaatggccggccaatgctgggcgcatttttcccgtagcgtggccatcaggtactccgtcgcctcccaccatagctccggcgcttgttctgaccagtgcggatgaggccgctgaatactcagcggcgcgctatggctggcgataacctcatggttctcatcaatgaccagcgctttgacttccgatgtgccgagatcgatacccagatacatagccacctcttagttaatcagcgtgtaaacggcggcgactttctcgcgcatcagcgccaggaaatccgcgttgttggcgagatcaccaaacagggctttatcgcgcgcgtagacagccaccggatcctgagcctcgaacatctcatgcaccgcctgcgcatccaggatgccgtcctggtactgatatggcagagttcccttgtgccactgctccataaagacgaagaacagcgccggcagcatggcggtcgcttccgggcggacgccgcgctggtagcactcctgcaaggttggcgcgatcatcgccggaattttcgagaagccgtcggcggcgacgcgctggttggtgtcctggatataggggttggtaaagcgcttaagcaccacatcccggtaggtcggcagatcaatgccgttatcgccgagacacggaataacgtcctccgtaacgtagcggtcggcaatggcgtagataacatcggtcagcgtgctttcatgaatatactgctggccgattaaggttcccgcccaggcaatgcagctgtgcgacgcgtttagaatacggattttcgcctcttcatacgggatgaccgactccaccatctccacgccgaccgcctccagattcgggcgggcatcgcggaagttgttctccactacccactggataaaggtctcccccatcaccggcgctttgtcatcaattccggtttgcgctttgatgcgggccggcagatcggccgccggacgcggggtgatgcggtccaccatggtgttcggacaggtggtgttggccgccatccagtcaatcaccgcctgtttgccggtgagctgcaggaactcgaccatgccgtcgtggaaacgctcgccgttatggcgcacgttatcgcagttgagcagggtcagcggcccggcgttgtcggccatgcgcttttccaggatccgcgcgagggtgccgtaaatggttttgcactcgccttgcaggtcggcctgcagatcggggttactggtttccagctgatggcgagtgttcaggtagtaccccccttccgtcacggtaaaggcgataactttggtctgcgggtttgccccttcgttaatcagcggctgtagcccggcctgccacggcagcagtttctggattgaggtgatctcttcatattcgcgctccccttccgggctgacggtctcgaggacgtaacgtcctccctgcgccgccagcgcctggaccacctgctcggcgtcgttgcgaatattccccgccgcgatgcgccagcgattatccccggaagcaatcagacgatgcagataccacgcctgatgcgcgcgatgaaaagaacccagaccgatatgaagccatgtgaattgattgttcatgttctgctctccttgagttgatggcgccactgtaattgatcatttgacctaaataagagccatagatcacaaaagagcaattacccaattaaattacaaatgaccagaaaagagcaaaagcttgccagttatgccaaccacggcgagaatgcgggtattcgccgggccaattgcgtgccctggccagcaacttagggcgggaaaccatgagtaaagaagacgatatccggttggatcagaaggtgcgtgccgcatggatgtactacatcgccggccagaatcagagcgagattgccagccagctgggcacctccagaccggtggtgcaacggctgatcgccgccgcgaaagaagaagggattgtgtcaattaatctgcaccatccggtagcgaactgcctcgattatgcgcagttgctgcaggaaaaataccgcttgatcgagtgcaatgtggtccccgcctttagcgaagaaagcaccctcgacagtgtgtcatttggctgctatcagctgatggctcgctatctgcaggatgataaagagaaaatcatcggtctgggctcgggcctgaccctgaaaaaagcgctgcagcgcatcgattttgacagcctgaatacccgctgcgtggcgctgatcagcgccatgaacgccgacgggcagtgcaattattacgatgacgtgcccctgctgctgacccgcaaaattaaggccaagtactatcagtggccggcgccgcgctacgcccaaagcgcggatgagtatgaaatgtggtgcaccaatcgcttattccgcagcgtctccggcgtcgcccgcgaggcggacgtgatttttgtcggcattggtccgctgggcacgcaaagtccgatctttaaagatggctttatcaatcaggcgcagatggatgagctgaccgcccgcggcggcatcggggagatcctcgggcggtttattgatgcgcaaggcgacgtggtagacagcgagatcaaccgcatgatcaccagctatgatatccgccagagccactgcccgcggattgccgctgcctgtggagaacataaacgaccggcgatcctggccgcccttaaaggcggctggatcaatggcctggtgaccgatgagcataccgcccgctggctgctgacgcggtaacgtttaacagccagacagcgactcagctgctgctcatcagtcgcgggggaatttcaatccgctgctggctggcttcgccggcgtcaataatcgaaaaaacagcgtccagcatcgccggcacgtcctgctgcaccatgtcgatatcgtgccccagcaggtagacaaaaggatcccagtcgaagcagcccatcggcggctgctcgctgccggtcagacccacctgcgacagccagcgcacaaccccttccagggatatcgtcgagttaacaaatatcccctgcaacaacgtcttcgcgctgccaaaccgctcctgcaggcagtcctcaacgtgtcctttcgaatagccgggagccagaatattcgcctgcggcacgctaagccccagctcgcgatgcgcatcgtggaagccgcgtaaacgctcgctggtgttatggtcgctgctgcgccctccgataaaggtcagcggcgccagctctccgcggcggcgggcgctattagccaggatcttatgagtcagcgctttcgcgccgccgtagttatccgaaatcaccgacggcgagagagagcccggcaggtcgagattgaccgttggcacgcccgcctgctggcatagcgcggaaattttatccggattggtcgccccggtcgcgaccacccagtcaacctgccaggagagcatcgcctttaccgcttctatctccagttccggacgccggcgcgtacaggtgataatcggcagcaggccgcgctcgcgggccatctcctcaaagcgttcggcgatggaaccgaagtagcggttatcatatttggggataatcataccgatgacgtgtgattttttactgcgcagcatgctggcctgacggttaatcgcatagccctgctcctcggcaatccgcgtcaccttttccgcaagcttggcgctgatgcggcgctttttccagttaccgttgaggatagcgctcaccgcgctcgccgaaacgccggaaagttccgccaggtcgtaaatcgttatcttcttcatttttccaacttgcgtcacaaaatcatgtcgctgttaatttccccacttgctcaatcgatgaagcgagagcaacatagcttcatcgattgagcatccttttcacgccaggaagtacgcgcgcataccgcctcaacatgccagcaagcctgaattaagatgctgatattcaatatgttaccaggtttagtctatcacctcgaacgtgatgccctcgcgttcgatagttttaaccagacaaggcaaaggattataaaatgaaccactctgtctcctctatgaatacttccctcagcggtaaagtcgccgcgatcaccggcgcggcgtccggtatcggcctcgagtgcgcgaggaccctgctgggagctggcgcaaaagtggtactgatcgaccgcgaaggcgaaaagctcaacaaactggtcgccgaacttggcgaaaacgccttcgccctgcaggtcgacctgatgcaggcggaccaggtcgataacctactgcagggcattttgcagcttaccgggcgtctcgatatcttccacgccaacgccggcgcctatatcggcgggccggtggccgagggcgacccggacgtctgggaccgcgtgctgcaccttaatatcaacgccgccttccgctgcgtgcgcagcgtcctgccgcatctgatcgcgcaaaaatccggggatattatcttcaccagctcgatcgcgggcgtggtgccggtgatctgggagcctgtctataccgcgtcgaaattcgcggtgcaggcatttgtacacaccactcgtcgccaggtggcgcagtatggcgtgcgcgtcggcgccgtactgccgggcccggtggttaccgctctgctggacgactggccaaaagccaaaatggacgaagcgctggccaacggcagcctgatgcagccgattgaagtggcggagtcggtgctgtttatggtgacgcgttcgaaaaacgtcaccgtgcgcgacattgtgatcctgccgaacagcgtggatctctgaccctggccagcctgtgagaggatgtgatgcaaaacgatacgcaaaacattattggcgtggatgtcggttcgggcagcgtgcgcgccgggatattcaatctacggggcgagctcctcgcccacgcgacccgggaaataaccctgtttcgcagcgccggaaataaggtcgagcagtcgagccgtgagatctggcaggcggtgtgctactgcattaaaacggcggtggccaacgccggcgtttcgccgtcgtcgatagccgggatcggcttcgatgccacctgctcgctggtggtgattggcgataacgatgcgccgctggcggtcgggccttcggacgatgcggaccgcaacattattgtctggatggatcatcgcgccaccgggcaggcggaaaagatcaatgccacgggccacccggtactgcggtacgttggcggcaaaatctcgccggagatgcaaacgccgaaaattttgtggctgaaggagaatcgcccgcacatctatcagcaggcgcgccacttcttcgacctcgccgattacctcacctggcgctcaaccggcgatgaagcccgctcggtctgcacggtgacctgtaaatggacctatctggcgcatgaacaacgctgggatgccggttacttccgccagattggcctcgaagagctggcggatgaagattttgtccgcatcggccagcggattgtcgatccaggcaccccctgcggcgacggcctttgcgccacggcggcagaggagatgggcctgccgatcggcacgccggtggcggtggggatgattgacgcccacgcgggcggcatcggtaccgtcggcgtgcttaacggcgcggtcaacaatatggcctatgtcttcggcacttcttcctgcaccatgaccaccactcaggaagcggtattcgtcccgggcgtctggggcccttactattcggcgatggtgccgggctactggctaagtgaaggcgggcaaagcgccgccggcgcggctatcgaccagctgctgagcttccatccggcggcggcggaagcgcgcgagcaagcgaaagccgcaggcgtccctctaccggtctggctggcggatcgcgttctgacgcaagttgcttcgccttctgaagcggtaacgctggccgccggtctgcacgtcgttccggagtttctcggtaatcgcgcgccgcttgccgatccccacgcgaaagcgctgattgccgggctggggatggagcgggacctggataacctgaccgcgctgtacgttgccggcttatgcgggattggctatggtctgcgacagatcattgacgcccagcgcgcctgcggaattgagagtgaaaatatcgtcatcagcggcggcgccgggcagcatccgctggtgcgtcagctgttggccgacgcctgcggcgttagcgtcgtgagcaccgccagccgcgagccggtgctgttaggttccgccatcctcggcgcggtggcgggcagagtcgcggcttcgctgccggaggccatgaagcagtttactcaggtggatgccacctatcacagcgagacggcgtttagcccgcttcatcagcgcaggtatgcggcctataaggcgctacaacaggccggcaggctgattcgcgaataacatacctccttattttataacaataatgctccgctgctgtgcagcggagacactcatctgcactctgaaatcgaggtcaacatgtccgttaataacaaacagtggtacggtctaccgctcaacctcatctggggatatgtcgccatcgccgtgtttatgaccggcgacggctttgagctggcttttctgtcgcactacatcaaagcactcggattcaccccggcgcaggcttcctttgcctttaccctctacggtctggctgccgccctgtcggcgtgggtctccggcgtggtggcggaaatcattaccccacgtaaagccatgctgattggcttcgtgctatggtgtgtattccacgtactgttcctcgtcttcggcctcggtcgcgccaactatgcgctgatcctgctgttttatggcatccgcggcctggcctacccgctgttcctctactcctttatcgtcgccattatccacaacgtccgcagcgacagttccagctccgcgctgggctggttctgggcggtctactcggtgggtatcggcgtgttcggcagctatattccgagctttaccattccccacattggcgaaatgggcaccctgtggctggcgctgctcttttgcgccaccggcggcattattgcgctggtgtcgatgcgtcataccgaaacgccgcgccatatgcagaacctgaccactcgtgaaaaattcgccgaactggggcgcgccgcgacgctgctctataccaaccgcagcattctgttctcgagcattgtgcgcattatcaacaccctgtcgctgtttggttttgcggtgatcatgccgatgatgtttgttgatgagctgggatttaccacctcggaatggctgcaggtatgggcggcattcttcttcactactatcttttcgaacgttttctgggggattgtggcggagaaaatgggctggatgaaggttatccgctggttcggctgcatcgggatggcgctttccagcctggcgttctattacctgccccagcacttcggccataattttgccatggcgctggtaccggctattgccctggggatttttgtcgccgcgtttgtgccgatggcggcggtgttcccggcgctggagccgaaccataaaggcgcggccatttcggtctataacctgtcagccgggctgtcgaactttctggcgccggcgattgccgtggtactgctgccctatttcagcactatcggcgtggtaatagcctataccgccttatatattctggccttcttcctgtgcccgttaatccgcgttgaacagcctggctttaccagcgatcagcatgcgaaaccgtttaccgccaacgcggcagagtcttaataaaccgcatctggtacaaacaacgagcaatccgggcggtgccgcccggatttttgccttatgcgatagtcactttgccatccagataaacatcctgcacggcattgatcagcttcacgccgtcggccatcgatttcttaaacgctttgcggccaaggatcagccccatgccgccggcgcgtttattaatcaccgccgtgcgcaccgcgtcggcaaggtcggtctccccgcccgccgcgccgccggagttgatcagcccggcgcggcccatatagcagttggccagctggtagcgcaccagatcgatggggttatcgctggtcagtttgctgtacacccgatcgtcggtatagccgaagttaaccgctttgtagccgccgttattctccgccatcttttgcttaacgatatcggcgccgatggtggccgccaggtggttggcctgaccggtcaggtcagcggaaacatgatagtcgacgccgtctttcttgaacgccgaattgcgcagataggcccacagcacggtgaccaggcccagctcatgggcccgctcaaaggcggcggaaatctcttctatctgacgacgcgattgttccgagccgaaatagatcgtcgctcccacggccaccgcccccatattgaacgcctgctcaacgctggcgtagagggtctggtcgtattcggtgggatagctcagcgtttcgttatggttgagcttcaccaggaaagggatgcgatgcgcgtagcggcgcgacaccgaggccagcacgccgtaggtcgacgccacgcagttacagccggcttcgatcgccagctcgacgatatttttcggatcaaagtacagcgggttggcggcaaaggaggcgcccgccgagtgctccacgccctggtcaaccggcagaatggaaaggtagccggttccccccaggcgtccggtattgtacagggtctgcatattgcgtagcaccgccggtggtcggttgttatccaccatcacccgatcaacataatctgcgccaggcagatacagctggtcggacggaatggttatacaacggtgctgcaacaggctctcggcatctttgcccagcaactgcgtaatatcagtcatagcaatctcccgtaaggccggccgaagccggcatgcattatcccaacccaatttttttgggcaggttaagcctggtaccgacttagcctattttccagccggggggccattttttcaggagattctgctgtcccgttgcgctgccatttaccaccaggcgtggaaatggtgcaccggcccgataccgtggcctacctccagagagtcggcctgtgccagagccgccgacagccaggccttcgcctcgataacggtggccgcccagtccgcgtgacgcgggcgcagcgccgccagcgcggcggagagcgtacagccggtgccgtgggtatttttggtctgcactcgcggcgcggtgaaccgctgttccccttcgcgggtgaagagccagtccgggctttcggcatcgtcgagatggccgcccttcatcaataccgcgccgcagcccagcgccagcagcgcccgcccctgctccagcatttcccgttcgttacgcgcatggggggcatcgagtagcgcggccgcttccggcaggttcggggtgatcaatgacacctgcggcaacaatcgttgacgcagggtctctaccgccgaagccgacagcagcggatcgccgcttttcgccagcatgacggtatccagcaccacgttggccacccggtagcgcgccagccgctcggccacggcttccacaatatcggtctccgccagcatgccgattttggtggtatcgatacgcacatcgctgaacaccgagtcgagctgcgcggccacaaaatccggttcgatgcgatagaccgactgtacgccgcgggtattctgcgccaccagggcggtgatcgccgagcagccataggcccccagcgcggagaaggttttcagatcggcctggataccggccccgccgctgggatcggtgccggcgatggtcagggcgttgatgcgtttcatccctgcacctcctgatacagcgcgtcgagaaacgccggaataaagctgcctgggcctccctgacgggcggcgatcgccccggcctgcttcatcagcccgcaggcggcggccacgttttccagccggtctcccggtagcgccgcgctcgccgccaccaccgccgacagcgcgcagccggtgcccaccacccgggtcatcagcggattgccccccgccacgctgagcacccgctcgccgtcggtgacgtagtccacctcgccagtgaccgccaccacggtagccagccgacgagccagcgcctgggccgccggcagcgccgctgcggccgtatcggtggtatccaccccgcgcccgccggcgctcatcccggccagcgccagaatttcagaggcattgccgcgaatggccgccggctggagggccagcagctcgtgacaaaaggccgtgcgcacggtcagggcgccgaccgccaccggatccagcgtccagggcttgccggcctgacgggcgtgctccaccgcggcgcgcatcgccacggcgcgatcttcggtcagggtaccgacgttaattaacagcgcatcagcgatagcggcaaattgcgccgcttcgcggggatcgatcaccatcgccggcgaggcgccgacggccagcagaacattggcggtaaaggtctgcaccacgtcattggtcatgcagtgcacaaggggggaatgggcgcgcagcagatggcgcaggtgcgcgacaggcgcgggattcaacagctcaggcatagtttgctcccgccagacgaggtagaagcaatgaccctgcggtctctgacttccctacgctggcattatccagatcaggtggtacgggtatttctcagccttcaacgaagaagggcaccccgagtcaaaatagtgaaattgttaagcgttgtggaatttaccgcaactcaccggttcatacaacaagcctttagccctggatacgacaccttcgcggccatcatgctcatcaggcgaccgggcgggattgcattccgctgctggcgggcggaaaataatgacatcatgcgctatttagcctaccgaggatatacgccatggccgtttatcaccatgcgctggtactgattaacagcagtcaggacggcgtcccgctgctccagcatgccgccagaatggcagaagagaacggcatgcgcatcaccatcgcccacatcagcaccgattaccgggcgctgaactatgtttccgacagcctgcgcgacgatcgggtctcgcaggaggtgatccaggccaaagccctgctcaacgagctggcctgcaccgtctccctgccggtggataccctctcgctggtgaccacccgccggtttgaagacgtggaaacctgcgttcggcagcggcagatcgatttaattattgccgggcaccataaccggttgctgggcgtcctctcctcacactcgctggagtacatcaaccacttaaacctggacgtactgatcaagcacctgccctagcgcaaggcggcctgcagcagagaaaaacagtcttcaattagcggaggcagcgcctgcgggccgcgcatcagggccactgtgcgggcgagcgccggctgctgcaggtgggcgaccctgagcgccgggtcctgcagatgggtggtgtacagcgccggcagaatcgccaccgctaagcgcgagcgcaccagaccatacagggtttcgatatagtccacctggtagcgggtggtcagcgtcaggcgatggctctccactaatgccgccaccagccgctggatattgcccttcgagaacacagcaatatcccgccccaccagctgtttccacggcagatgtgcctgcgcggccagcggatcgtcgcggtgcagcaccgccacgaagggatcttcgcgtagcggatagaccagcagttctgcgggcagtgagctgtcgatcgccccgatgccgaaatcaatctcgccgcgctgcagcgcctggataagcgcatcgttggtctgatcgtgaaattcaatgcgcagacgcggaaaggcctcagccagggtctgcggcagcagcggaaacagcagcgaactgaccgacggcaccagaccgatacgcaccgtcccgtcgccgcccgcctcgacaatctgctgcatatcggaaaaggccgcctgcgccacgctgaggatccgctgggcgtggggtaaaatcgccgcccccagttcagtcagagtgaccgtcgcagcggtacggttgaccagtttgccgccgagtaccgtttcaatctgccgcagggcgctgctcagcgccggctggctaatcgccagccgactggcggtatcggtaaaatggcgcagctgggccagggtgacaaaatactgaagctgtttaagagagagcgcgggcagccgctgccagggttcgttcatcatcgggttcgctacggtggtcctgcacaataacccgagcttatcgggtgataaatttattcatctgggcaaacgtttgctgtgcccctagagtatccgcattatccttgtgccggagtggttatgtccagcaatgctcaagtccgccgtcgcgccgtgcaggccgcgcgcggtgaatccccgtttgatctgctgctgatcgatgcgcagatcgtcgatatggccacgggcgaaattcgccccgctgacgtcggtatcgtcggcgagatgatcgccagcgtccatccgcgcggcagtcgcgaagacgcccatgaagtgcgttccctggccggtggctacctgtcccccggcctgatggacacccacgtgcatctcgaaagctcacacctgccgccagagcgctatgcggaaatcgtcctcacccagggcaccaccgcggtgttctgggatccgcatgagctggccaacgtcctcggcgtcgctggcgtgcgctatgcggtggacgccagccgccatctgccgctgcaggtgatggtcgccgccccgtccagcgtcccctccacgccgggtctcgaaatgtccggcgctgatttcgccggcgcggagatggagaccatgctcggctggccggaagtgcgcggcgtggcggaggtgatggatatgcacggcgtgctgcacggtagcgagcggatgcaggagattgtccaggccggtctcaacagcggcaaactgattgaaggccacgcccgcggcctgagcggcgctgacctgcaggcctacctcgccgccggcgtcacctccgatcacgaactgacctcggcggacgacgcgctggaaaaactgcgcgccgggctgacgatcgagatccgcggctcgcacccctatctgctgccggatatcgtcgcggcgttaaaaacgctgccgcacctctcctcgcagatcaccgtctgcaccgatgacgtgccgccggatatactactggagaaaggcggcatcatcgccctgcttaatctgctgatcgagcacggtttaccggcggtcgatgcgctgcgattcgccaccctcaacgccgctattcgcctgcagcgccacgatctcgggctgattgccgccgggcggcgcgccgatctggtggtgtttgattccctggagaaactggtggcccgcgaagtctacataggcggtaagctgctggcccgcgcgggcaacctgctgacaccgatcgcgcccgccgcgggcgtcacgccgccgcgcgatactttgcagatcgcccccctccgcgccgatgactttattctgcgcgtccagggcattcgtcacggcatcgcccgcctgcgccatatccgcggcgcgcgcttcacccagtggggcgaagtggaagtgcaggttcgtgacgggatagtccagctgcccgccggcttcagtctgatctgggtcaagcaccgccacggccgccatcaggcgacgccgcaaatcgccctgcttgaaggctggggtgagctgcgcggcgccatcgccaccagctactcccacgactcgcataatctggtggtgctcgggcgcgacgctaatgatatggcgctggcggccaaccagcttatcgcctccggcggcgggatggcgctggcgcaacagggcgagatcctcgcccatgtggcgatgccgattgccggcatgctgtcggatctcccggccgcggaactggcgcgtcagttccgcgagctgcgcgatctgagcagccaagtcgccgactgggagccgccgtaccgggtcttcaaagccattgaaggcacctgccttgcctgtaacgccgggccgcatttaaccgatttgggtctgaccgacggcggcagccgccagatagtcgacccgttgatagcctgccgggagatcccggagccaaccgatcacaacaataatcctcagggagcctgagcatggccgataacacacttcactcttccgcccgcgctaactggctggagcgccgctttgcgctgcgctcgcgcggcggcacgctacgcaccgaatgcctggccgggatcaccggctttctcgccgccgcctatttactggtggttatcccggggctgctggcgatcggtgggatggataaaggcgccgccaccaccggcaccattctggtcttcgtcgtcggctcgctgctgatggcgttttatgccaacctgccgtttatcgtcggcccgggcattggcggctcggtgctggtgggggtgacgctggccggtagcgaagggattggctggcagactggcctcggaattgcctgctggtcggggatcctcttcttcctgctgacccgctttggcctgcgcgaagtggtcacccgctcggtgccgcagtcgatcaagctgggattgacggcctccatcggcctgtttgtcgccgtcctcggttttcgcaatgccgggctggtgctggccaatgcgaaaaccaacgccctgatgctcggcgactttctcgcccccggcgcgctggtggcgctgtgcggcctgttcctggcgatagccctgcaggcgcgtaaggtaccgggcgcgattttgtgggctattttgtgcgccacgctggtgggtatcccgttcggcgtgactaaactgccgacgcattttatcgatgccccccactcgctggcgccggtgctgggacaggttgacctgctgggggcgttaaacatcgccttcctgccgttcctgttcgtctttttcgcatctgagtttttctccaccatggggacaacgctggcggtgggcggcgaggcgggtctgctggatgaagaaggcaacatgccgcagattaatcgcccgttcatggtcgattcgattgccgccgcgctcggcccgtggctgggcattccggcggcgacggcgctgattgaatcttcggcggcagcggaagcgggcggcaaaaccggcctcaccgccctgtcggcggcggtaatgttcctgctgatgctgctgttcacgccggtggcgttgatgatcccgaaagaagccaccgccccggcgctgatcctgattggcctgaacatgttcagcggcctgcgcaaagtggatcttgccaacttcaccgacgggctgccggtgctgatgatggtgatgatcacccttatcgccaacagctttggcaccgggattgccggcgggctgctgttttacattgtgatcaaggctatcgccggtaagtggcgggagatcccgattggcctgtgggtattggccgtcccgctggtgtattacttcgcgaccttagtcaggcattaagcccttcacaatgtgatttcacctcttcatataacaaacgcaccgcggcagagagctgtttgcggtgcggacaaatcagattcaacggcactacatccccctgataacgcggcagcaggcgccgcaggcgccccgcccgcagatcgtcgctgacgtcgagcatcgatttataggcaatgccctccccggcgatcgccagccgacggatcacctcggcgtcgtcgctcatcaccgtgccggaaaccttctgctgctgaaccacgccgtcgaggctcagcgaccagcggtcgaacggacggccgcgcaaaatgtagatcaacgcattgtgctggctgagttcctcgagggtctgcggttcgccatggcgggcgatccactcaggcgaggccaccagcacccgacgattttccggcgccaccggcagtgagataaacgaggcatcgtcgttattgccatagcgaaacgcaacgtccaccggatctttaaacacgtcggtcagttgatcggaaaagagcagccgcaggcgcagcgccgggtggcgttggcggaaatcgcggaacagggtcaggagcaggttacgcccgaggtccgacggcacggcaatctgcaacatgccgcgaacttcatcgtccggggtctggatcttctgcagaccggcctcgagggtatcgagcatctgggtggcgtagggcagccaggtctctccctccggcgtcaggcgcaggctgcgggtcgaacgggcaaacaggcgaatattgaggatcgtctccagacgcttaattgccgcgctgacctgcgccggctgctgcccggcctcgcgcgccgcgtcgctaaaactgcccagcgccgcggcgcggacaaataaggtcagatcttccagcctgaacatgccgattctcccctgcttcagattgctcccaaaatacgcatcaccgtcgctgcaacgcaagcggcacaagacttgcgccgcgttttgcttacactttttaaaaatccagtgcttgccatttcagcaacgcatcaggaatgatacgaggctgctattttgagtccaggtaatattgaggaaactatgcgtaaaacaaaaatgatgcttctgggcgtacttcttgccaccgctggcgccagctggacggctactgccgcggggatcgatcagtatgcgctgaaagagttcaccgccgatttcacccagtttcacatcggcgacaccgttccggcgatgtatctcaccccggaatacaacattaaacagtggcagcagcgtaacctgcctgcgccggacgccggcagccactggacctatatgggcggtaactacgtgctgattaccgataccgaaggcaaaatcctcaaagtgtatgatggcgagatcttctaccatcgctgatccgcgcaatctccacgtccgccccggcgagccagcggactctccggcgctgcgccagatcttcctgcgggcgcgcagtttatcgtggacctggcttcccgccgcggcgtggcggctggaggatttcgatgccgccaccgcggatgaacagctgtgggtcgcggaatgcgacggccagccggtgggctttgccgccgtatggaccgccgataatttccttcaccatctgtttgtcgaccccgactggcaaggcaaacatatcggcagcgcgctgctggcgcaggtcgaacggacctttaccgctagcggaacgctgaagtgcctgatggaaaataaaaacgccctgcgcttctaccagcgtcatggctggaccattgaagcacagggcgcgtcgcccgagggcagatactggctgatgcgctcgccgcggccttaaacggcgcggaaggcaatctcaccggggatcacttctccctgccagtacatctgggccgccacccggcccgccagctggcggtagatgtcggtaaattcgctgtccggacgcgccaccaccgtcggcgtgccgttatccagatcttcccgcagcgtaatatgcagcggcagctggcccagcagctgggtgtggtatttctcggccagtttttgcgcgccgccggtgccgaagataggctcgtggtgcccgcagttgctgcagatatgcatgctcatgttttccacgatccccagcaccggcacttccactttctcgaacatcacgatgccttttttggcgtcgatcagcgcgatgtcctgcggcgtggtgaccaccaccgcgccggtcaccggaatgttctgcgccagggtcagctggatgtcgccggtgcccggcggcatatccagcaccaggtaatcaagatccggccacagggtctcctgcagcatctgcatcagcgccttgctggccatcggcccacgccagaccatggcgttgtcgtcggtcaccaggtagccgatggagttggttgccagaccatatttcatgatcggcgccatatgagtgccgtccggcgaggtcgggcggctgtcttccgcacccagcatggtcggaatcgacggaccatagatatcggcatccagaatgcccaccttcgccccttccgccgccagggccagcgccaggtttacggcagtagaagatttaccgacgccgcctttgccggagctgatggcgataatgtttttcacgccgttgaccccgggctggtttttcacccgtttgagggtcgcgatgctgtgggtcagcttccagtcgatggccttcgcgccggtgatgcgcagcagttcggcgctgcactgctctttcagcgcttcgaaagcgctgctccagacgaacggcatttgcagttcaatatggacggtatcgtccagccaggcgacatggtgcagcgccttaagggcggtgagattatgcttcagggttgggtgctggaaattggccagcgtcccggcgaccatcgcacgtaggcgctcaggggatttggcctgggattgcgaattcatcccgactcctttgttgttttgagatgctttcagtaatcacagagtttatcacaggtaacgattatccatatatgggcagccatttatggcgcacccacagcccttttggtaatatcggaagccctttttacaacagaagatgtaatgctcactatgactcaagtcgcgaagaaaattctggtaacgtgcgccctgccgtacgccaacggctccatccacctcggccacatgctggagcacatccaggctgatgtctgggtccgttaccagcgaatgcgcggccacgaggtcaacttcatctgcgccgacgacgcccacggcacgccgattatgctcaaagcgcagcagctcggtatcactccggagcagatgattggcgaaatgagtcaggagcatcagaccgatttcgccggcttcgacatcagctatgataactatcactcgacgcacagcgacgagaaccgcgagctgtcggagcttatctacacccgcctgaaagagaacggttttattaaaaaccgcaccatctctcagctctacgatccggaaaaaggcatgttcctgccggaccgttttgtgaaaggcacctgtccgaagtgcaaatctccggaccagtatggcgataactgcgaagtgtgcggcgcgacctacagccctaccgagcttatcgacccgaaatcggtggtctccggcgccacgccggtgatgcgtgactccgagcactttttcttcgacctgccgtcgttcagcgaaatgctgcaggcgtggacccgcagcggcgccctgcaggagcaggtcgcgaacaagatgcaggagtggttcgaatccggcctgcagcagtgggacatctcccgcgatgcgccgtacttcggcttcgaaattcccaacgcgccgggcaaatatttctacgtctggctggacgcgccgatcggctacatgggctccttcaagaacctgtgcgacaagcgcggcgacaccaccagcttcgacgaatactggaagaaagactccacggccgagctgtatcactttatcggcaaggacattgtctacttccacagcctgttctggccggcgatgctggaaggcagcaacttccgtaagccgactaacctgttcgtgcacggctacgtgacggttaacggcgccaaaatgtccaagtcgcgcggcacctttatcaaggccagcacctggttaaatcatttcgatgccgacagcctgcgctactactacaccgccaagctctcttcgcgcatcgatgacatcgacctgaacctggaagatttcgtgcagcgcgtgaacgcggacatcgtcaacaaggtggttaacctcgcctcgcgcaacgccggctttatcagcaagcgtttcgacggcgtgctggccgctgagctggccgacccggcgctgtacaaaaccttcaccgacgcggcggaaagcatcggcgaagcatgggacagccgcgagttcggtaaagcaatccgcgaaatcatggccctcgccgacgtggctaaccgctacgtcgacgagcaggcgccgtgggtggtggcgaaacaggaaggccgcgacgccgacctgcaggccatctgcaccatgggcctgaatatgttccgcgtgctgatgacctggctgaagccggtcctgccgcagctggccgcgcgtgcggaagcgttcctcaacagcgaactgagctgggacgccattcagcagccgctgctggcgcataaggtcaatccgttcaaggcgctgtacaaccgtatcgagatgaagcaggtggaagccctggtagaagcctctaaagaagaggtgaaagccaccgcggcgccggtcaccggtccgctggcggacgatccgattcaggagaccatcacctttgacgatttcgccaaagtcgatctgcgcgtggcgctgattgaaaacgcggaattcgtcgagggctccgacaagctactgcgcctgacgctggatctcggcggcgaaaaacgtaacgtcttctccggcatccgctccgcctatccggatccgcagccgctgattggtcgcctgacggtgatggtcgccaacctggcgccgcgcaaaatgcgcttcggcatctccgagggcatggtgatggccgccggccctggcgggaaggatatcttcctgttaagccctgacgacggcgccaagccgggtcagcaggtgaaataacaaaaaagccggagagtatctccggcttttttttgcccggcggcgctatgctagcacgcgcccgggggcagtcgttgtaggccgggtcaggcgaagccgccacccggcaaaaaatcatgccttcgggttatgcacccgctgggtcagtccgcgcaggaaattacgcagaaactggtcgccgcactcgcggtagtttttgtggtcaggcgagcgcatcatggcggtgatctccggcaccgacacccggtatttctgctcgctcataatcgcctggatatcgtccgttttcagcgagaaggcgatccgcagctttttcagcaccgtgttgttattcacccgacgctccagcgccagctccggggccgaatcatctttgccgcgcttgtcatagataaggccgttaaggaaacccgacaggataatgtccgggcagcgaacaaagccctcttcatcctctttcgtcgtccaggtgtcgaagctggcggcggtggattccatagcggagagcgcgagaatgcgcaccatatcgttattattgactttcagggtgtagcgtaggctacgaagaatatcattactgagcatgagggccttttactgtcgatgatgcaatggggcgcagtgtaccagctttacaggccaatcgcctctttcaggctttttaaatagcgccggctcaccggcaccgtttgcccggcgcgcatcagcagctccgcctggccattctcctccaggcgaatctccttcaggtgcgccatattcaccaggtactggcgatggcagcgcagcaacggcgtgcggctctcaagggtgcgcagggtcagttcggtaaagccctcttttccctcgcggtcggtcacgtagatgccgctcatccggctgctgacgaaggccacatcctccatctgcagaagccagatacgactgtggccggtacagggaatgtatttcagcgtctgctgagcatcatccagcagcgacacatcctgcagattacgctcctggcgcaggcgggcgagggttttctccagccgggcagcttcaatcggcttcagcagatagtcaaaggcatgctcctcaaaggctttcaccgcgtattcatcaaaggcggtgagaaacacgatataggggcggtgctccgggtcgagcatcccgaccatctccagaccgctgatgcgcggcatctggatgtcgagaaacagcacgtcgggacgcagcttatgcaccgcgccaatggcctccaccgcgttgccgcactcgccgacgatctcgatatcgcgctgtgtctccagcaaaatgcgcaggttttcccgcgccagcggctcatcatcgacgatcaatactctcagcatgcattctcctccaggggcagacgtagggtgacacgggtaaagcgctccggctcgcaggtgacgctgatgccgcagtcggcgccaaaacgcgcccgcagccgcctgtccaccagattcatccccagcccgctggcctgggggttggcccggtacagcccggcgttatcttcgatatccagctgcagccagcgatcgtcctggctggcgcggatggtaatttcgccgacgccaagatgttgcgatgtaccatgcttaatggcgttctccacgatcggctgcagggtaaaggccggcagctggtgatgcgccagcccttccggcaccgccatctggatctgcaggttagcctgaaagcgagccttctcaatctgcagataggcgttaacatgctcgatctcatcggcaagagtgacaatttccgtcggccgtttcaggttcttgcgaaagaaggtcgacagatactgcaccagctggccggcctgatcgctgtcgcggcggatcaccgccttcagcgtgttaagcgcgttaaacaggaagtgcgggttgacctgggcgtgcaggagcttgatttcggattgcgtcagcagcgccttctgccgctcgtactgtccggcgaggatctgcgccgacagcagctgggcaatcccctccccgagggtgcggttgatcgaactgaacaggcgatttttcgcctcatacagtttaatggttcctatcacccgttgattctcgccgcgcagggggatcaccagcgtcgaccccagcttacagtgcggatgaatcgagcagcggtaaggcacctcgttgccgtcggcgtagaccacctccccggtctcaatcgcccgttgcgtatacgaggaggagataggcttgcccggcagatggtgatcgtcgccgatgccggtaaacgccagcagcttgtcgcgatcggtgatcgccaccgcaccgatatccagctcctggatcagcacctgggccaccttcatgctgttctcttcgttgaatccctgacgcaggatcccctcggtggacgccgccaccttcagcgccgtggcggaaaaggcggaggtgtacttctcaaacatcgcccgcttgtccagcagaatgcgcataaacagcgccgcaccgacggtattggtgaccatcatcggcgcggcaatgctctgcaccagatgcagggcgtcctggaacgggcgggcaatcagcagaatgatcatcatctgcaccagctcggccaccaaggtgatcgccccggcggtcagcgggctaaagactttgtccggccggccgcgtttgaccagcacgctgtgcaccagaccgcccagcagcccctcaacgatggtggaaaccatgcagcttaaggcggtcattccccccagcgagtagcggtgcaggccgccggtgagccctaccagcccgccgaccaccggcccgccgagcaggccgcccatcacggcgccgatggcgcgggtgttggcgatcgagtcttcgatatgcagaccgaaataggtccccataatgcagaaaatggagaaagtgacgtagcacagcagcttgtgcggcaggcgaacggtgacttgcatcagggggataaacagtcgggttttgctcatcaaccacgcgatgaccaaaaatacgcacatctgctgaagcagcagcaacaccagatcaaactcgtacatacccgcaaaccacacatgcctgaaagcgcgtaccataccctgcctggcgaaaactttctttgaagccctgcataaaaatgaaaaatgacggccaggatcacacttttttgcggcgcgttgcgcagcaaacgcggcaaaaaccccggcgcggcgcgctaaaccgcaattaatgtttcattaacacctgcgcttcaccgtataatccccctgttaacatcaggagcctattatgaagccagcgaaaatcgcggtcgtcaccctcttcttacttatggccatcggcgggatcagcggcgtaatgctggccggctattcctttattgtgcgtggcggtgtcggctgatccagcgggtcagacgctcaaacgcgcggtcgacgataatcgccgccagcgccaccagcagcgccccctgtacaatataggcggtattaaagccgctcaggccgatgatgatcggcgtcccgagcgtactggcccccaccgtcgaggcaatggtcgcggtaccaatattgacgatgaccgaggtgcggatccccgccaggatcaccggggccgccagcggtagttccaccttatacagacgctgccagccggtcattcccatcccttcagccacgcctgacaccccaggcggtatcgaacccagcccggccagcgtcccctgcagcaccggcagtatgccatacagcgcgagggctatcagcgccggcagccagccaaagcccagcaccggcaccgccatcgccagcaccgccaccggcggaaaggtctgcccgatagcggcgatggtctccaccagcggacgaaacgcgctgccggcgggccgggtgaccgccaccccagcccccagcccgattgccgttgccgcgaggctggacgccaccaccagccagccgtgatcgagagtgagcgcccagaagctctcctgctggtagaccggccgcggcagttccgggaacagccgactgaacagcggcgcgctgtagggcagccctgccagcaggccgataaacagcgcgataagccaccacagcggctcacgaagcgccttcatggctcatctcctggcgcagcagatcggcaaaatgcagcgtaccgcagggcctgccttcggcatcgaccaccggcagcgtctcgcagcgccgggcgacaaactgcgacagcgcttcccgcagggtcatggtgacggtcagcccctcgcccgccagccgttcgtcgggacgcaaatagtcccccacctcgcgcagcgacagcaggcgcacacccagctcgctgcgaccaaaaaaggtctgtacaaagctatttttcggtcgcaggagcatctccagcggcgccccctgctggaccacctcgcccccgtccatcagcaccaggtggtccgccagacgcagcgcttcgtcaatatcatgggtcaccagcacaatcgtccgtcccagcagacggtgaatgcgcagcatctcctgctgcagcgcctcgcgggtcaccgggtcgagggcgccgaagggctcatccatcaacagcacctccggatctgccgccagcgcccgcgccacccccacccgctgctgctggccgccggagagctgatgcgggtaacggtcgcgcagcgtcgcctccagccccagcagcgccatcagctcgtcgatccggtcggcgatccttgcccgcggccatctttgcaactgcggcacggtggcgatattctgcgccaccgtccagtggggaaacaggccgatggactggatggcatagcccatccgccgccgcagggtcaggaccggctgctggcgaatgtcctcgccggcaaagcgaatggtgccccggtccggctccagcagacggttgatcatcttcagcgtcgtcgacttgcccgagccggaagtccccaccagcaccgagaaagcgccttcgcgcagctccagggtcaggtccttcaccgccgggtggccggcaaacactttgctgaccccttgaaattcaatcattggcctctccttttagccaggcgccccacagggcgaacagggcatccaccaccaccgccagggcaatggtcggcaccacgcccagcagcaccagatccagcgcactgctcagcagcccctgaaaaaccagcgcgccaaagccgccggcgccgatcagcgcggccactaccgccatgccgacggtttgcacgctgaccacccgcaggctgcgcagcagtaccggcatcgccagcggaagctgcacctgacgaaagcgctgcccggcgctcatgcccattgccgtcgcgctttccagggcatcctgcggcacctgctgcaggccggtcaccaccccgcgcaccagcggcagcagcgcatagagagtgagagcgatcagggctggcgccacgccggtcccggagacgcccagctcgcccagcgtcgggaaataacgcgccagaccggcaagcggcgcaatcagcaggccaaaaagcgctaccgacggaatagtctggatcacattgagcgcggtgaaagccggcgcctgccagcgcggacgccgccacagccatacccccagcggcaggccaatcagcaggcccggcagcagggtgccgaacagcagaagcagatgctggcgcagggcgtcatcaaatacctcctgacggttggcatactccttcagcaaggagagctgatcgagcgccccgatagcgagcaggatgatgggcaacagccagacttgcgcattgagcagccagcgccagagcggccggacggtaagatgacggatggcctcgctggccagcaacagacaaagcgccagcgacagccacaggccgctgccgggcgaggtgcgcgccagcggcgagccgtgccgggagagctcaagcgccgcctggccgctgccccagataagcagcgggaagagcagttcggccagcagcaggtggagaaacggcatgatcctgcccggcagccagcaaagcagcatcccggcaagggccgccgccagctgaacgccggcgagccagggcagcacctgccacagcccgcgcccttccccggagagtaagcgattcggcgcataagtgacaaacggcagcgccagcgtaaccagcagcagacctgtcagcagcaagccgacgcgatgagtacagcgaatggtcaccggtggcttacttcagcaggcctttctgctgcagataatctgccgccacgcgcttcgcatcctggccctccaccgcaatgcgggcgttcagctgctgcagcgttttttcatcgaggctggcgaagaccggctgcagccagtcggcgatctgcgggtaggccttgagcaccgcctcgcgcaccaccggcgtcggggcatatatcggctgcacgccctgcgggtcgctcagcgtctgtaaccccagggccgccaccgggccatcggtgccgtaggccatcgccgcgttaacgccggaggtctgttgcgccgccgctttgatggtcaccgccgtatcgcccccggccagcgacagcagctggttctggttgaggttgaagccatacgctttttcaaacgccggcagcgcgtccgggcgctcaataaattccgccgaagccgccagcttaaattcgccgccctgcttcaggtagcgactgaggtcggccagcgaggtcagcttatttttctccgccaggtcctggcgcacggcgatagtccaggtgttgttggccggcgccggggtgagccataccagctgatgtttctcctgatcgaggcgcttcaccttctcatagccctgttgggcattcttccacgccgggtcgttttcatctttgaagaagaaggcgccattgccggtatattccgggtagatatccaactcgccggcgacaatcgccccgcgcaccaccggcgtggtgccgagctggattttattaatcgtttttacgccgtggctttccagcacctgctggatcatattgcccagcagcgcgccttcggtatcaattttcgagccgaccttcaccggctccgccgcctgcagcggtaaacttatcagggcggccagcgccagcgcgccggaccatgtcgttgccatcttcatcccgcttccctcagttcttttgcgcttcgcttacagaagcttaagagaaaagcgtagcccatttgccagcgatgcgaaaaagaaaaggccgattaatcggcctttaaagcgtgacgttggacttaagagcgatgccttacagcagctcaaactcgctctgcttcacgcgggctgagtccacgccgataaagacattgaatttgcccggctcagcaacgtatttcatctgctgattccagaacttcagcgcgtcgacgtcgattgggaagctaacggtttgcgtttcgcccggtttgagggtgacctttttaaagccgcgcagcattttcaccggccggctcatggaggcggtgacgtcctgcaggtagagctggatcaccgtcgccccttcgcgattgccggtgttggtcacctgcacgctggcggtcacgctgccatcgcgcggcatggtggccgacgacatgttgacatcggagacgctaaaggtggtgtagctcaggccgtaaccaaacggatacagcgggccattggcttcatcgaagtaacgcgaggtgtacttgttcggcttctccggattatacggccggccggtattcaggtggctgtagtaggttgggatctgccccaccgagcgcgggaaagacatcggcagcttgcccgacgggttgtagtcgccaaacagcacgtcggcgatggcgtggccgccttcggtgccagcaaaccaggtctccagcagcgcatcggcttgctgatcctctttcaccagcgccagcggacgcccgttcatcagcaccagcaccagcggtttgccggtggctttaagagcggcaatcagattgcgctggctctgcggcagggtgatatcggtccggctggaggcctcatgcgccatgccctgcgcctcgcccaccacggcgaccaccacatcggattgcttcgccgccgcgaccgcttcgtcgatcatttcctgcggcgagcgtgggtcaacctgcaccgcgttctcatacaaattgaggaaatcgacaatgcctttgtcatcggtaacgttcgcccctttggcgtaaatcactttgccgttatcgcccagcgcttctttgatgccggtcaggacggtcaccgactggtcggccaccccggccgcggaccagctgcccatcatgtcgcgcttgctgtccgccagcgcgccaaccaccgcgatagtgccggattttttcagcggcagcgtatcaagacggttcttcagcagcaccaggctctcgcgagccacttcgcgcgcctctttacgatgcagacgactttccgcattggtatcctgcgggtcagaatctttcggtcccaggtggctgtagggatcgttgaacagtcccatatcatatttcacgttgagcacgtgtcgggtggcatcatccagctcggccatggtcaccttgccggacttcaccagccccggcaggtacttgctgtaatactcgtcgctcatgctcatgttgatgccggacttcagcgctacgcgcaccgcgtcttccgggtcggaggccacgccgtgcttaatcaactctttgatggcgccgtggtcggaaacggtgatgcctttaaagccccactggtcgcgcaggacgtctttcagcagccaggaatcagaggtcgccggggtgccgttcagcgagttcagggctaccatcaccgcgccgctgccggcatcaagcccggctttatacggcggcatatagtcgttgaacaggcgctgcgggctcatgtcgaccgtattgtactctttcccgccctccaccgcgccgtaggcggcgaaatgcttgacgctggtcatcaccgaatagcggtccgccgggctcttgccctgcatcgactccaccatcgcctggcccatcatcgtggtcagataggtgtcttccccgaacccttcggaagcgcgtccccagcgcgggtcgcgggagacgtcgaccatcggcgcccaggtcatgttcaagccgtcatcggcggcttcataagctgacacgcggcccacggtcttcaccgtatcaaggttaaacgacgaggccaggccgaggcttatcggaaacacggtgcgctgaccgtgcagcacatcgtaggcaaagaacagcgggatcttcaggcggctaagctgcatcacctgatcctgcattacacggatatccgggcgggtaacggtgttaaaaatcgcccccacctgaccgttcttgatcatttcacggatcgcctctttcgggttatccgggccaacgcttatcagacgcagctggccgattttctcgtccaccgtcatttttttcagcaggtcggtgacaaaggcatcccgcgcctgcggggtcagggggtggttaccaaacagttcatccgccagcgcgggttgcagcgccagactcacggcgacgcctacagtgcagagccatttcattgttatctcgctttatctcagacggggactcggtaaaacataataaaaaccgcagtttgccatatatataaacaacgcgcccgcagaatgctaaggttcttctctgatttttgcgaaacattcatgcatcaaattgtcatacaaagcgctatgcttatcctcgatatttcgcgcaccaccacaaggagtggaacatgtcatctgcacccactgacacccataaaacgtttctggctgacctggcgcgcctggttggcccttcgcatctgctgaccgacccggcaaaaacccagcgctaccgcaagggcttccgctccggtcagggcgaggccctggcggttgtctttcccggtaccctgctggagctctggcgcgtgctcaacgcctgcgtagacgccgataaaataattctgatgcaggcggccaacaccggcctgaccgaaggttcgacccccaacggcaatgattacgatcgcgagatcgtgattatcagcaccctgcgcctggacaaactgcatctgctggacaaaggcgagcaggtgctggcctggcccggcaccaccctctattcgctggaaaaagcgctcaaaccgctgggacgcgaaccgcactcggtgatcggttcgtcatgcatcggcgcatcggtcatcggcgggatctgcaacaactccggcggctcgctggtgcagcgcgggccggcctacactgagatgtcgctgttcgcgcagattgacgccgacggcaagctgaagctggtcaatcatctgggtatcgatctcggcagcacgccggagcagatcctcagccgcctcgacgacgaacggattagcgatagcgatgtcctgcacgacggccgccacgcccacgatcacgactatgtcacccgcgtgcgcgatgtcgatgccgacaccccggcgcgctataacgccgacccggaccgcctgttcgaatcctccggctgcgccggcaagctggcggttttcgccgtgcgtctcgatactttcccggcggaaaagcgccagcaggtgttttacattggcaccaaccagccgcaggtattgaccgagatccgccgccatatcctcgccgagttccagcatctgccggtggcgggggaatatatgcaccgcgatatttacgatatcgccgagaagtatggcaaagacaccttcctgatgatcgacaagctcggcaccgacaaaatgccgttcttcttcaccatgaaggggcgcaccgacgcgatgctggagaaagtctcgctgtttaagccgcactttaccgaccgctttatgcagaagctcggccacgtcttcccggcgcatttaccggagcggatgaaaacctggcgtgataaatatgaacatcatctgctgctgaagatggctggcgacggcatcgaagaagcgcagcgttggttgacggagtacttccagcaggccgagggggatttcttcgcctgtacgccggaggaaggcagcaaggcgttcctccatcgctttgccgccgccggcgcggcgatccgctatcaggcggtgcatgccgacgaagtcgaagatattctggcgctggatatcgccctgcgccgtaacgataccgagtggttcgaacatctgccgccggagatcgacacccagctggtgcataagctctactatggccactttatgtgccatgtgttccatcaagattacatcgtcaggaaaggggtcgacgcacacgcgctgaaggaaaaaatgctggagttactgaaagcgcgcggcgcccagtatccggcggagcataacgtgggtcatctgtatgaggccccggagagcctgcagcagttctatcgccagaacgatcccaccaacagcatgaacccggggattggtaaaaccagcaagcagaaatactggggtgaagcggccccgacgccagcctctccggcggatccgcaataatcgacggcaggactattcagcctggcgcttctgtattacgctgcacgccggagaatgtttctccggcagattcaggagcgccgccatgcccgcagaggccccgttactcgacagtgatttagaaattcgcgaagcgctgcccgacgatgcgcacgccatcgccgcgctgtatgtctggcacgtacttaatggccgcgcctccttcgaagagatcccccccaccgttgacgaaatgcgtaaacggatccagaccgtgcgcgacaacgggctgccgtggctggtagcactgtggcgcggggctatcgtcggctactgctatgccaccttctatcgcccgcgtccggcctatcgctacaccctcgaggaatcgatatacgtggaatccggaatgggcggacgcggcatcggcagcgcgctgctgtccaggctaatcgctgagtgcgagaaaggcccgtggcggcagatgctggcgatcatcggcgatggccataacaatgccggctcgctggcgatccataaaaagttcggctttaccgtggcgggtcagctgcgcagcgtcggctacaagatgggcgactggcgggatacgttgattatgcagcgcgcgctgggtgacggcgactggacgctgccggagtgatatccggcgccaaatccccggctcgcggcgtaaacgccttagccgggctaccgttcagcgcggttccgtagaagcgtcagccgccatcctgcacaaacaccggcactcggcctgattgcccggcggcgctgctggactgaccccataaagttggatggttcatattaagcggctctcagagcctgggttcggtactctaccggactcaggccttttaatttcaggcttatccgctcgttgttgtagtaatggatatagtcctctacggcttttcttagcgcactgacactcctgaactccctcagataaaaacactccgatttcagggtcccgaagaagttttccatcactgcattatccaggcagtttcctttacgcgacatactctgcgtcatcccatgcgcctttaaacgttcctgatagctcctcatcctgtaatgccagccctgatccgagtgcagcagcggagcatctcccggtctgagcttcgggaacgcaccgtccagcatcgtattcaccatctccatcaccggcctttccgacaggctgtaggcgataacctcccggttaaacagatcgagaactgacgacaggtaaagcttttttccctgtaccgggaactctgtcacatctgttacccatttttcgttggcttttgacgcaccgaagttccggctcaggatattgggcgcggcctcgcccgttctccctttccaggcacgatattttttcgcccttatcacagaccggagtgacagttctgccatcagccgctgcactgttttatggtttatccgcagcccctgttttctcagtgcgagcgtgatcctgcggtagccataacgacctttgtgatagtggtatatcttcctgatgttctctttaagacccgcatacctgtccccttgcttcagtgcattcatattgtaataccacgtgctacgggacataccggccgcccgcagaaggtcccgcagagcgtgttcatgccttagttcactgattatcagggctttttgccatttttttcgctctgaaccaaggctttcaacttttttagataggcattctctgcccgcagataacgcagttcggccctgagctcttcgggggagagtttttccagctctttatctgtcagtggtgggatattttttggctttgtcatttgtccgggccgtccgcattgcatgtttaaaagaccttccgctccggcatcgttgtacacgtcgagccagcgccggacaagtatttctgcggagagattaaaccgggcagccgcttcacgcatcgtcaggcggtcactgataaccgcccggacgaccacgagtttaaattcatcggaataatgattattttttgcagtcaggccttctgcaccgtggaactgccatgccctgacccagcgacggacagatgttctttcaataccaaaaaggtcggctgtactctgttctccgtctttaccggacaaataatgattaaccacagccagttttgtttcaggggaatactttggtttagccataaaattgcaccttactcagttgggtgtccaacttttggggtgcagtccactgcgcttgccgggcctacgaaggggatgaacccggcgccaaatcatgtaggccggataaggcgcgagccgccatccaccacaaacaccggcactcgacctgattgcccggcggcgctgcgcttgccgggcctgcgaagggggcaaacccggtgccaaatcacgtagcccggataaggcgcaatgcgccgccatccgtgagacatgcagattaatcgttctgcgcggtctgcgcgccgcctttcagcatcgcctccgccatctgcgcttcgcgctgctttttatagctcagcgccgaggcgggtaccggcatcaccttcccggtttcaatccaggtccgcaagcggctggcgtcagcgaagtgggtatatttgccgaaggcatccatcaccaccagcgccaccggacgttggttaatcaccgtgcgcataatcaggcagtggccggcagcgttggtgaagccggttttggtcagctgaatgttccagttatcgcgatacaccagatggttggtgttgcggaacggcaggctgtaggccggatgggcgaaggtggcggtctcttctttggtggtgctcagctggccgatcagcggatactgctcgctggcgatcagcagtttggtcagatcgcgggcggtggagacgttatgcaccgacaggccggtgggctccacgtagcgggtatgggtcatgcccagcgcctgggctttggcgttcatcgcgcgaataaaagcgtcgtagccgcccggatagtgatgcgccaggctggcggccgcgcggttctcggaagacatcagcgccagcagcagcatatcgcggcgactaatctggctgttgaggcgcacgcgggagtagatccccttcatttccggcgtatggctgatatccaccgtcagcatctcatccagcggcagatgggcatcgagcaccaccatggcggtcatcactttggtgatcgacgccatcgggcgcaccagatccggctggctggcataaatgatttttttcgtggccagatcgacgatcatggcgctgccggaggcaatttccggctgcgaggcggtcaccgccgtcggggtttttgctaacgcctggggcgcaaaaggcacagccagcagcaaggtcaggctgagcaaagagactcgaaatttcggcatcatgggcattctgaaaagtatttttgcacgttatggaacgtacgccgcgaggttaagtgggcaacttcgctggcaaacgccatcataccgcgccgtaaggccctgtgcctaataagaatcgtgaagaaatgctgcattgccgacataaaatacatatttgccggcaatgcatatttacccgtgccgcccgatcagaagagtcggtagccatacccccagagcaccacggtgatggccagcagcacttccagcaccagtaccccaatagctagcgtcgagctggcaaagcttaacccctcttcccgattaatgctcaggaaggtcggaatgccgagatacagcagatacccggtatagaacagcgcaatagtaccgaccagcgcgcacagccagaccagcggatagagcgccacaatcccgctcagaaacagcggggtggcgacgtagccggcaaacaccatgcagcgtttcagggaaggctgctgcggatactgcctcgccatccaccagatgacccgccccatgatcgccaccccggcaagcatcacggcataaaacagcaccgccagcgccagtccggtcagcatcgacagtttaatcacggtgccatcgccgaagttccagcccagctgcgtggtgccgataaaggcgcagactaccggaaccgccgccatcagcagcacatgatgcgtatagtgatgagaaatggtttcattctcgctcttaatcacgctcatttcccggttgggatgagcgaagagcccccagacatggttcatagcgtcccccttgtcacggcttcgtactgcactgatccaagtataattcaccctgtagattattttatgtacagcacagaaaattctgcgtcgccgcgttttggtcagcagggtgtatgattaagaggtgatgaggtaaggagaaaagctttttatggatatcaatcacctgatttcccagtatggctacgcggcgctgatcgtcggcagcatggcggaaggtgagacaattaccctgctgggcggcgtcgcggcgcatcaggggctactgaaatttcccctggtggtgatcgccgtcgccctcggcgggatgattggcgatcagctgctctatctggtcggtcgccgcttcgggggacgcatcctgcgccgtttcgccagtcagaaagcgcggatccgtaaagcgcagcgtatgatccagcaccggccgtggctgtttgtcatcggcacccgctttatgtatggcttccgggtaatcggccccctgctgatcggcgccagccgcctgccgccgcgcattttcctgccgctgaatattgtcggagcgctggtgtgggccctgctgtttaccaccattggctatctcggcggcgaggtggttggcccgtggctgcaccatctggatgcccatctgaagcactggatctggctgatcctcgcggtggtggtggtggtggccgcccactggtggctcaggcggcgcgagagtaagaagaaagactaagcggcgcgcccgcgggcgcaccgtggttggcggttacttcaccgtctggtggtagccgccgccgagggccgaggtcagttgaatgctagcgtcaatccactggccgtgcaggcgcaatgcggtgatccgttcctgcagcgccgggagcttcgccatactgactctggagccaggtaagatccccgccgccattcgggcctgcgccagatccactacccgctgagcgtctttttcaacctgctgctgctgctggcttttggccattaatgtttcgacctggctggcggttttcgccacctggttaacggcatccaccaccgctttgttgtactgggcgatcgacaggctattctgcgcgctggcgatatccaggttagcgttaaggcggccgctgtcaaagatcggcagcgtcaacccggcagtaacgcccatctgctgcgccgaatggcggaaaagatcgcttaagtgcagggcatcctgctgcaggaacgccatcagattgatgtccggataaaacgccgctttcgccgcgtccacttcgctcagggacgcctcaatataccagtgggcgacctgcagatccgggcggcgcgccagcagctcatagccgagggtatctggcagctgcgcgctgaccgttggcaggctggcgggtttgaggtttagcgactggctctggctgttggtcagggccatcagccgcgcttcaatctctttcatcgtgcccgtcacgtccgccagctgctggtcggttttgctgacgttaatatcgttctccgccccttcggcggagttagtgatcccgcgctgatacagggccttgtcgaccgtcacgatattattttgctcgtttttcacctgctgcagcaccgctttgatcgccgcttccgtctgccactgccagtacagacgcgccacgctgccggagagcagctcacgggtctgggcctgttcagcaacctgggctttcagctcgccgatacgcgctttcaccagcgcacggtttttgccccacagatcgagatcccaaccggcggtcaggccaaaggtaccgttggtgtaccacgggccggtattgccgtcggtgtcggtagcaaacggtcccatcaggccttcggccgacatgcgctggcgttcaatatcggcggagaaatccatctccgggccaagattcgcctgcgacattcgcgcctgcgcttcggcaagcctgatgcgctgttcggcaatctgcatatccggcgcgttggccaacgctcgctgaatcagattattaagctgtgggtcatggtaatctttccaccagtcagtctgcggccagccatttttcacggcggcagggagatccatggaaacatgggaggctggaatttgctgctgcggcggattagcaacctcatgagatggcgcgcagccagccagcgcgatggccaggggcaatgccgccagcacgcttttatttaatatcaatttcattggacaggtcagataacttaatcaggttggttatcataagttaattgaattaaacgcgtttagtaaagcgtgtgactaaattattagtttgctaaaaataaacaaccttatcaattcaaggggtgaatatgagccggcatcttttaacgagccgcacctcttttccaccctgcccgctctggatgaagagaaagaacctccgatgacctttttactgcgcgcgcgtaaaccggctaatctcccgcccggcgatggccgggcgggcatcctttaggctttcaggctggcgccgcggctggcaatcacctctttataccagccaaagctcttcttcttactgcgcgccagggtgccggtaccgtcatcatggcggtcgacatagataaagccgtagcgcttcgacagctccgcctttgaggcgctcaccaggtcaatcggtccccagctggtaaagcccatcagctcaacgccatcgtcaatggcttcccgcgcctgcaccaggtggtcgttcaggtaactgatgcggtagtcatcgttaatgctgccgtcggcttccaccttatctttggcgcccagaccgttttccacaataaacagcggcttctggtagcgatcccacagcacgttcagcagcgtgcgcaggcccagcggatctatctgccagccccactccgagctcgccaggtgcgggttcggcaccatgctgagaatattgccgcgcgcctgctggttcagcgcctcgtcggcggtgacgcagccggtcatgtagtagctgaaggagataaagtcgacggtggtttttagcgcttcacgatcggcgtcggtgatggtgagcgtgatgccgttgtcacggaaatagcgctgcatatagcccgggtacgcgccgcgcgcctgtacgtcgccgaagaactgccagctgcggttctcctgcagcgtctcgaacacatcctccggtttgcagctcaggggatacatcagcccgccgagcagcatattgccgattttgccctcaggcaccagctcatgacaggctttgaccgccagcgcgctggccaccagctggtggtgaatcgcctgatacacctcgcctttgctgctgccggccggcaggccgacgccggtcatcggggcatgcagcgacatattgatttcgttaaaggtcagccacagtttgaccttatttttatagcggctgaacaccgtccgggcgtagcgctcaaagaagccaatcacctcccggctgccccagccgccgtagttttttaccagcgcccatggcatttcataatgcgacagcgtcaccagcggggtgatgctgtgcttcgccatctcgtcgaacagcttgtcgtagaacgcgaggccggcttcgttcggctcggcgtcgtcgccgttggggtagatgcgggtccaggcgatggagactcgcaggcagttaaagcccatctcggcaaacagggcaatatcttccggatagcgatggtaaaaatcgatcgccacatcttttatgccgctgtcgccgggtacgcgctcgaccacttcgccgaacacgccgtgcggctgcacatcggaggtggataagcctttgccatcttccagataagcaccttccacctgattggccgcggtcgcgccgccccataaaaaatccgtcgggaatgttttcatctttttctcctgtgattaatggctgactgacaacagcggctgaccggcttcgacggtgctggacgccaccgtatcaatctcccggtagtcgtcgctgttgctgataatgatcggggtcaccaggtcgtagccggcgtccagaatcgcctggcgatcaaactcaatcagcagatcgccggcctgtaccctgtcgccctctttcacatgcgcggtaaagggcacgccgtcgagtttgaccgtgtcgatgccgacgtggatcagcagctcaatgccgctgtcgctttgcaggccgatggcgtgtttagtctgaaacagggaggccacttcgcccgggaacggggcaatcacttggcccaccgccgggataatggcgacccctttacccagcaggccgctggcgaaggtgctatccggcacctgctcgagggcgataacgctgccgctcatcggcgccagaatatcgtttgccgaggccggggctaccgtcacggcgcccggtgcagcgctggcgcgcggcaggccggcgaagaaggtcagcacgcaggcgagcacgaaagccacgccggtgccgataagcccgccccagacgctggcgtcaatcccgccgggcgggatcatctgcgccgggaaaaagatattcggcacgccgaacgagtaagcatgactattactgaaggcggtgatcgccccgccgatggcgccggcgatacagccgaagataaacggacgacgcagcggcagggtcagaccatagatagccggctcggtgatgccaaacagccccgcagaaaaggcggaaccggccagcatccgctgacgcgcatcgcgggtggccagcaaaatccccagaaccgcccccacctgggcaatcaccgccggaagaataatcggcagcatggagtcgtgaccaagtaccgtcatgttgttgatcatcaacggcaccagcccccagtgcaggccgaaaataacgcacacctgccacatggcgcccagtaccgcgcccgccagccatggcgcaaacgcataaatgaactggtagccgttggccagcagatggctcagccaggtggcgaccgggccaatcaccaggaaggtgagcgggaccaccaccgccaggcagatggccgggctgaagaagtttttcattgatgacggcaacagcgcgttgctcttgcgctccagccagcaggagacccatgaggcgagaataatcgggatcactgacgagctgtagttgataaaggtcaccggaatgccgagaaagtgctccaccgccgcgcccggcgcctggctggcctcaaaggcctgaatcatcagcgggtgggttaacgccccgccaatcaccatcgagataaacgggttgccgccaaacttcttcccggcggtatagccaagaaacagcgggaagaaaaagaacagcgcgtcgctggcggcaaaccagattttataagtcccctgctccggcgtaagccagccgcaggtcaccgccagcgccagcaggcctttcagcagaccggttgccgccatcacgccgataaacggtgtaaaaatgccggagatgatgtcgataagctggcttaacaccgatcctttggccgctttttcctcggcaaccggttcgctgtcatcgcttaaccccgcctcctggcgcaccgccagccagacgtcgtgaacgtggttgccaatcaccacctgaaactggccgccgctctccaccaccataatcacgcccggattggccttcagcccttcggcatcggctttgccgttatccttcagtttaaaacgcagacgtgtcgcacagtgaaccagactcacaatgttctctttgccgccgacgcggttgagaatatcctgcgcgagtgctttatattccatgctcttttccttactgccgctgcccgcagacaaccggcgactgagtagtaaaaaataaaaaaacccgagaaccacgccggtgggcgtcgcgctcaggttttgcctgcatcatgcagtaacaatccagttttgttggggagaattaacgcccctcttttcttacccgttcgatatgaatggcaagaaacataatttcttcggtggtcagcgaccgttgatactgcttttgcagatgcgtcgccaccgtttccgcacacttccacgctttggcgtagttatctttcaccgcgctgtgcagcgagacgtcgtcatcttccaccaccgtgcgcgtcagcatccgctgggcgaaaaacttcaggtgggtgacgaaacgctgatagctcagcgactcttcatcgtagttaagctgcagctgatacttcaccagctgcaggatctcctgcatcacccgggtcacgtgcatgacctccggcatttcgctgttgagctgcgccgtcaccagatgcagggcgataaatccggcttcatcctccgccagcttcacgccgagccttttggcaatgatggcccttgcctcctggcccagcgcgaactccttcggatacagccgcttaatctcccacagcagcacgttacgcagtgcgatgccctttttctgccgctcgatagcaaaatgacagtgatccgttaacgtgatgtacaaactttcctgtaacttgcccagccgtccgcgtgccaggtcgataatgcgatcgcaggtggtcatcacttctaacggtatctgactgagaagctcgcctaagcggccgaccagctcatcgctttgtaaggcgaaaactttttcaattttactgtcgtccagcacgtcgcccgggcgtttctgaaaggccagccctcgccccatcaccacctgttcgcgccggtgctcgtcgagaaccaccaccacattgttattgagtactttggcgatttgcatatagaccccagaaacaaaaaaacctgacccccgacgaaacgccaggtgatcaggttttgcctgccgcagcagttgcaatccaacacccgcactgtaacaacttctgctgcgcgctcaacctgacaagtgaaaaaacgtgattaagatcgcgactatcagaaggtcacgacggttttccactccactacccacgcatcctgggtctgcgcgacgccgcccggacggtgccagtactgcaggcccggctgcagctccagccaggagaccgggcggaagcgataatagagctcaccgttcagcgaatgaccggccaccggctggtaagccggatcgttatagtcggtggcgccgcttatctgattcatatagcgctgattacgtgcgtagtggctgctcatgtcgatccacgtcaggccgaagccaatccagtcctccgggcgggcgtcaaacagaccgcggtagcgcatggaggcggcgacggcggagtggatatagttgctgcgctggtcgctgaggctgccgctcagtgagacgctcatcccccgcagcgggtcgtcggcgtggcgggtgatctgctggttcaggccggcgtacataaaccaggtgctatcgtgctcggcgtaaccttgcggatcggtcgccccggcgccgccggatttaccgctgtagaggtcgctctgcggcgcgttagtccagaccacgccaaggttataggctcccggcaggccattaatcagcggacgggtttcgatctccatcggcagtaagatgcctttgctacccttcgtcgaccagctccacgcgtggctgcgcgcggtagcctgcgggttttgctccatcactccgcctttcagggtgaccgtcggcgtcagcttgtactccagggtggtgccccaggtatgaatgttccagttattccaggtcagcgagttggccgatttcccaccgcactgggtcagcagctgaaaatcgcagggaatgatctggtcgaaggtttgcaccttgttcatcatgccgatgcgccaggtcaggcggcggtcgtcaaagctgcgggcaaaggtgagccagccaaggcgggtaatcgacccgccgccccagctctcctgcgatagatcgttgaaactcacccgcggatcctgcagccgtttcgtggtgagattatcatcgtggttgcggttgacgatattgccctcaagccgcgcgtccggtatgccggtccagcgctccagatcctgggtaaaggtcaatgacacctggtcaatataggccagatgtttatcatggttatagccgccgccggcgttgtaggccatctcgttaagatagccgagattataatgaaagccgttttcttcaaggatcggacgaatgcctagcatatcgcccagcagcccttgctgcccggcttcaaaccccagcgcgctgccgttccacgccgggatgtccgcggcgctcacggcaggcgccatggccgccagcatagcgccgatcaaaagctgatttatttttttgttatgcattgtgatatccaccgtgactgaataaaaacaaaggggatccccaggctatttatttacccgttttctttttttaaaaatgaatggcaaaaagcgtccgtcggtaataaaaccgcgacaatgccagagaaatcgttattcacatctcattgttttacatcatcattttatccaccctgaatttttaccaaaaaaaaacctaagcactttgcgccacgaatgacgaaagtgcttaggttttgcctgagttcagtagcaatcctgaattgattgaccgcacattatcactttattcaacccatgcctatcatcaataggcatgcaagtaataatatgtgaagcgaataacagtatggcggttaatagcggccgatcgccgccgctatttcagcagacgtttgcagggcgcgaatttcattaaacagggtcagcgcctcggtatattccttgcgtaaatagcctaaccactgcttaattctcgccacatgatacagaccggtatcaccctgcttttccaagcgggtatatttttgcaacagctggaccacctgcggccacggcatgcgcggttcattgtatttgatcacccggctgaggttcggcacattgagcgccccgcggccaatcatcaccgaatcgcagccggtgacagccatacaatcctgggcgctttgccagtcccagatttcaccgttggcgaccaccgggatagtcaggcgctggcggatctcgccgatcgcctgccagttgatacgttcggctttgtagccatcttctttggtacggccgtgaaccaccagttcgctggcccccgcctgctgcaccgcgtcggcgatttcaaagcgccgttcaccgctgtcccagccaagacgaactttcaccgtcaccggcagatgctcgggaaccgcctctcgcatggctttcgcgccgcgatagatcaactctggatctttcagcagcgttgccccgccgccgctgccgtttaccagcttcgacggacagccgcagtttaaatccaccccccatgaacccagcgccaccgcgcgggcggcattttccgccagccactcgggatattgtcccagcagctggacgcgtacgcgggtgccggacggcgtgcggctctggtgatgcagttccgggcatagcctgtagaacgattttaccggcagcagttgatccaccacgcgcagaaattcggtgatgcagagatcgtaatcgttaacctcggtcagcagctcgcgcaccagcgaatcgagcacgccttccatcggcgccagtagaacacgcatatcgttacccggaaaaaaaagaggcgctatggtagcgcctccgggcgctggttgaaagcgctcaatgcgtcggaccagacgcacgccgttccccgcacgctcgatgcggcaaagcggcgagataatctctatgctttacaggggtctgtggcgtcccattcgcctttatttgccgcgcctcatccagcaagatagcgtggtgagcgctcccgcctgagccgcaaggtgtcgggccctgacgggtgagactatggttcccgtaagctatcagcgctatgcatagaattcatgatgtgatcggtagcacattttagggattaattgtatgatgaatgcacttcatcaagggttattaccatgagtaaatcgctgactattatctggcagtacctgcgggctttcgtcctgatttacgcctgcctgtacgccggaatttttatcgccgggctgctgcctatcactatccccggcagcatcatcggcatgctgatcctcttcgtgctgctggcgctgcaaattatgccgccgcaatgggtcaaccccggctgcaatatcctgatccgctatatggcgctgctgttcgtgccgatcggcgttggggtgatgcagtactgggatctgctgcgcgcccagctggggcctgtcgttatctcctgcgccatcagtacgctggtggtgtttgtagtggtgagctggagctcccatttggtgcatggcgaacgtaaagtgattggccaaaaaggaaaagaagaatgatgcatgaaatctggtggtcgctaccgctaaccctgatcgtcttttttctcgcccgcaaactggcggcccgctttaagttcccgctgctcaacccgctgctggtggcgatggtggtgattattccatttcttctgctgaccgggatctcctatgagcgttattttgccggcagcaaagtcctgaacgatctgctgcagccggcggtagtggcccttgcgttcccgctgtatgaacagctgcaccagatccgcgcccgctggaaatctatcattaccatctgctttatcggcagctgcgtggcgatgatcaccggcaccaccgtcgctctgctgatgggcgccacgccgcaaatcgccgcctctattctgcctaagtcagtcactacgccgattgctatggcggttagcggcagcatcggcggcattccggccatcagcgccgtgtgcgtaatttttgtcggcatcctcggcgcggtatttgggcatacgttgcttaacctgatgcgcattcgcaccaaagcgtcgcgcggcctgtcaatgggcaccgcctcgcacgccctcggcaccgcccgctgcgccgagctggactatcaggaaggcgcgtttagctcactggcgctggtgctatgcgggatcatcacctcgttgatggcgccgttcttatttccgctgatcctcgcagtggtaggttaatagtgatttaaatcacattttttagtgcaacaaatcggagttgcataaagaatgagatattcatcacatatggaaccgctggccgcccgtacactggcttcccattacactgttatgaggcaacgctatgcactcacgttttcaagctgctttgacgactctggcagcagatctgcaggcggccatcgccccgatgctcgccgacccgcatttcccggcgctgctcgaagccgatcaggtggcgacgctgcagcatgcgacaggtctggacgaagacgcgctggcttttgcgctactgccgcttgccgctgcctgcgcgcgccccgacctttctcattttaacgtcggggctatcgcccgcggcgtcagcggccgctggtactttggcggcaatatggagtttctcggcgctaccatgcagcagaccgttcacgcggaacagagcgccatcagccacgcctggctgcgcggcgagacctccctgcgcgctatcacggtgaactacacgccgtgcggtcattgccgtcagtttatgaacgaactgaacagcgggctggcgctgcgcattcatctgccgggtcgcgaagcgcatgccctggagcactatctgccggacgcctttggcccgaaagacctggagatcaaaaccctgctgatggatgaacaggaccatggcttcccggtcagcggcgatgccctaacccaggcagctattcaggccgccaaccgctgccatgcgccctatagccactcgccttccggcgtggcgctggagctgaaagatggtaccattttcagcggtagctatgcggaaaacgcagcgttcaacccgacgctgccgccgctgcagggggcgctgaatctcctgagcctcaacggctatgattatcccgctatccagcgggcaatcctggcggagaaagccgacgcggcgctgatccagtgggatgccaccgtcgccaccctgaaggcgctgggctgccacaatattgagcgcgtcctgttaggttgatcagcctgagcagattgccggacggcgtcttcggcttatccggccgaccttttataccgttaggtgtcgggtggcgctacgcttacccgacctacggttcgcgccatggcgacctgaagatccctatgccgggtgtcggctcacgccttacccggcctgcattcggcgatctgtctatattgctgaaaatccccgcaatcaaacgcgggtttcttgcgcttacccggcgggtaaagtagcctgaagactccgttgtctattattgagccaagttcatgttaaagcgtgcgttctacagcctgttagtcctgctcggcctgctgctgttgaccgtgctgggccttgaccgctggatgagctggaaaaccgcgccctatatctatgatgaactgcaggacctgccctaccgtcaggtcggtgtggtgctgggcaccgccaaatattaccgcaccggcgtcatcaatcagtattaccgttaccgcatccagggtgcgctgaacgcctacaacagcggcaaggtcaactatctcctgctgagcggcgataatgctctgcaaagctacaatgaaccgatgaccatgcgtcgggacctgattaaaggcggcgtcgatcccgcggatatcgtactggactatgccggtttccgtaccctcgactcgatcgtccgtacccggaaagtgttcgacaccaacgacttcattatcatcacccagcgcttccactgcgaacgggcgctgtttatcgccctgcatatggggatccaggcccagtgctacgcggtgccgtcgccgaaggatatgtggagcgtgcggctgcgcgagttcggcgcccgctttggcgcgctggcggacctctatatcttcaaacgggaaccgcgctttctcggccctctcatcccgattccggcgcagcagcatgacgtgccggatgacgcccagtcctacccggccgtcaccccggagcagctgctggagctgcagaaagaaaagtagcctccatcaacgcattcgtttcagatataaaaaaacccgcgccaggcgcgggtttttgatgcgttcaatcttatttcttacgggcgtatttcagggagtccagcgccacggcgaagataataatcgcccccttaataatgtactgccagtaagggttgacgccgatataggtcaggccgtagttgatgacggtgaagataatcaccccggtcaccacgccaaacaccgtccctaccccgccgctgaacgatacgccgcccaccacacaggcggcgatggcgtccagttcgtacataaagccgaggttattggtcgccgagccgatacgaccggcttccagcaggccgccgaaggcgtagaacacgccggagagggcatagatcatcagcaggtttaacgctacgttaaccccggagaccttcgccgcttccgggttaccgccgatagcgaaaatgtttttgccaaagcgcgtcttgttccacaggatccagacaaagaagacggcaatcagcgcgtagaaggtaatgtaggacaggcggaaggagcccagcgccacaaacccctgcgcgaaatgggagaagtggctgtcgaagccggagatcggcgacgcgcccacgaagtcgtagtacagcgagttaatgccgtacacgatgatcatggtgccgagagtggtaataaacggcgtcacgttcaggtaggcaatgacgatcccgttaatcaggccgatgaccgccccgatggcgcacaccagcaggatcaccagcgggatcggcatggtcgccatatccgggaataccttattggcattatccaccgcctgcagcatggtggcggcaatcaccgccgccagacccacctgacggccggcggagaggtcggtcccctgcgtgacgataagtccggccacgccgagggcaataataatacgcaccgaggactgggtcagaatattactcaggttgagcagacttaaaaatgtcggatcctggaaaataataatggccagcaggaccagaaggacaacatatatcccaccctctttcaggtaagtgagaaaactctttttatttaacgcactcatgtgaagcccctgatcttaaaggtgcaatgacgcaagacgcagtatttcgttttgcgtagtggttttagtctcaacaatgcccgcgaccaggccgttgctcatcaccagaatgcggtcggtaatccccagcagttccggcatttcggaagaaataataatgatccctttgtcttttttagccagttcggcaatcagctgatagatttcaaacttggcgccgacgtcgataccgcgcgttggctcatccagcatcaggatctccggctgggtcagcagccagcggcctataatgaccttttgctggttaccaccggaaagcgagccaatctgcgtatgctgaccgggggttttgacgcgcatcgagtcaataacccattgggtatcgctcttcattcgcgagttatccagcaagccgatgctgtttttatatttcttaatattggagatcagcgagttaaacccgatatccagataggcgtaaatccctgtagagcgccgctcctcggtcaccagcgcaaaaccgtggtttatcgcctcgttggcgctgtggttgttgatcttctttccgtgcagcgtgatggtgccgctggccttctcacggatgccgaacagggtctccacgatgtcggtgcgtttagcgcccaccaggccggcgataccgagaatttcgcccttatgcaggtcaaaggagacatcgcgaatggagggctggcgcagcgaggtgagattgcgcacctggaggatcacttcgcccggagtgttttcgcgatccggaaaacgctggttaagcgaacgcccgaccatcatggcgatgatcttatccatatccagcccttccagcggctgggtggcgatccactggccgtcgcgcaggatggttatttcatcgcacaactggaaaatttcttccattttatgcgagatatagacgataccgcagccgcgatctttcagcttacggatgatcttaaacagatggttgacctctttttccgtcagcgatgacgtcggctcatccatgatgacgattttggcgtcataggaaaacgccttcgcgatctcaatcatctgcatctgagataccgataaggtaccgacgcgggcgcgcggatcgatatcaatatccagctcatcaaaaatggccttggtatcccggtacattttgtcctgatcgacaaacatgcctttagttggatagcgcccgagccacatgttatccatgaccgaacgctgtaataccaggtttaattcctgatgcaccatcgaaataccgttttccagggcttctttcgtcgaatggaaatcgatctcttttccctgaaaaagaatgctaccggaatctttttgatagatcccaaaaaggcattttaataatgtcgatttaccggcgccgttctcacccattaacgcatgaatggagtgcggacgaaccttcaggttgacattatcaagagccttgacgccaggaaacgatttgttgatgttgctcatctccaacaaatattcgcctgaccgttcgctattattgctgaccatagttatacctggctgcgttcatgcaagccccgtccggcgcactagcgccagcaggagtctggttctgtatcaggaataatcgggcgtggataacccacgcccgcaactcacatcacgattatttgccggtaaactggctcaggttgtctttatcgacgcccacgtaggggacgcgaacaatcttgttgtcaattttccagttggtgcctgccgcggcgtctttcccgtcggcaaggtttttcgccagctcgaaggtcgcttttgcctggttgttggcatcgttcagcacagtaccggccatcgcgccggatttcaccagcgccagggcttccggcagggcatcaacgccgaacaccggaatgctgctcttgttgtgcgctttcagcgcttcaaccgcgcccatcgccatggcgtcgttgttagcgatcaccacttcaatcttgttggcattcgggccggagagccaggcgtccattttgtctttcgcctgggcggtatcccacatcgcggtatccagctgcagctgctgggtcttcagacctttatcattcagctctttaataacgtaagtggtacgcgcttccgcatccggatggcccggctcgcctttcagcaggacgtactggatctgaccgtctttatttagatcccagttcgggttggctttccagtgcttggcgatcagatcgccctgaataatcccggactctttcgagtcggtaccgacgtaataagccttgtcataactatccagcgctttgcgggaaggctctttgttgaagaacaccaccggaatattctgcccgcgcgccttttcaatcaccgtacctgcggcggccgggtcaaccaggttaatcgccagcgccttcacgcctttcgccagaagcacgtcaatctgatcgttttgtttcgactggtcgttctgcgaatcattcatcaacagctggacgtctggcgcggatttgccatctttttcaatcgccttacgcactaccgacataaagttgtcgtcatatttataaatcgtcacgccgatacgggtatctgctgcgtgtgcggcggcgccaaataacagaccagccattacagcagacagggtaaacaccttcttattcatggaatctccggttttattatgcagggtcattattgtgagaaaatgcaggcgggatttgttgcattagtgttaccgcacaacgcatttcacgacgaaaattcggtcttccgtgtcgggtaacgctccagaaaaatacgactgtaaaactcgtttaacgccttgttcctactaaataaagtgaggaatatccatcacctcgtggttcagactggtaaacgctgccatcataatcaggcgaatgttaatatactgtgaatttactcacaaattgaaagcggttacatcccgcgatcgcgtcagttagtgatcggccccacagtttgccgctgggcaacggaatgacggcgcaccagcgtcggcataaagcagtgcgtcgcctcgcgatccagcttgccggccgcccccagcagcgccagctcggtggccagctttgccatcgacattaccggatagcgcacggtggtgagctgaggatcggtgtaacgggaaataggaatatcatcaaagccaatcagcgacagatgctgcggcacgacaatgccgttgtccttcagcgtcgtcagcgcgccggccgccatgctgtcgttataggcaaacaccgcggtgaggccgagattgcgccccagcagttcgaccatcgccgcttcaccgccctgcatatccggggagccggaaccgatccagctgtccggggcgatgatgccttgctcctgcagcgctttgctccacccttcccggcgcatatcgtcatcttcaatgccgtggtttgaggagagatagccgatgcgctggtgaccatgattgagcagcatacgggtggccatcagcgcgccgctgacgttgtcgagcccgacgcagcgatgggcataccccggcacgatgcggttgatcagcaccatccccgggatatgttgcataaagtcgctcagttcatcatcgctcagcgctttcgaatggacgatcagcgccgagcagcgctgacggatcagcacctcgatggcgtgacgctctttttccgcctcgtgatagctgttgccgatcagcacatatttctgatgctgctgagcaacggtatccactgctttcaccagcgcgccgaagaaggcatcggagacgtccatcaccaccacgccgatggtatcgctgacctgggtggccagcgcctgggcgttggcgttgggccggtagcccagttgggtcaccgctttcatcaccacgtcgcgcgtatccggactcaccagcgcgctgttattcagcacccgcgacacggtggccacggaaacgcccgcctggcgggcgacatcacgaatggtgatcatactcagcaaccttaagagaattacagcacgtcacattcacctcctgtgcttagcaaggaggctattctggcagcgacccgcggtccgctgcgtgagtgaggtcacacggctggaaacgtttacatccgttttgttaatgattgtgatcgagatcgttatctggatgtgtctttcaatgatgtgcctgacgcacgcagggttaactgacgccacagccattccaccggcccctggcggaagcggcgcagccagagcgatgagacaaggaggttaacggcccagatgggggggacaaaggccagcagctgcagacgatcgaagcgcataaacagcccaagatgataaaacagggtggtgcagatcagggtctgcagcaggtagttggtcagcgccatgcgtccgacgcaggcgatagcgcccaccaggcggaaacggcagagttgcggccagtagccccaggccagcgcggcatagccgatagcctgcagcggggcgctaagttcgcgcggcgcctgcagtaaaaacgcgcaccagcgatagtcccaggccagataccactgggcgaatattgccggcagattgaccgccatgccggccgccaccagcagcgcgccggtacgccggtagtgacgcaggctaaactgccccttcagccagccgctgcgcatcagcgccgcgcccatcagcatcatccccgccagctgccagccatactgcgcgcccagcgccagcagattgtcagatagcatatccgcccggttgctgaccgcctccatgccaccgtgcagcttccagtactgctcatactgcaggttcgccgcgtccggcgcccacgagcgattcgccgcggtcccggagatcatccccaacaggaccagcaccgcaatgccggtgaggtagagcaccaccccggtgttgaacagcgatttgacatggtgcgcctcacgcaccatgcgccagctcaccagccccaccagggcataggccagcagaatatcgccatcccagaaaaaaagaccgtgaatgaaaccgagcagcgccagcagcgtcagccgcgactggatccagcgcttccctcgcggaagcaatagctgaagaccggcgccaaacagcagcgcgaacagggtgagaaacttcacctgcgccagcaggtcgaggagcgcccaggtccaggcatcgctaagggacgcgcttcctgaccaggcgggattgagataagcggccttcggcaagccgaaggcgctgatattgagaagcaggataccgaggatggcgacgccgcggacaaagtccagcgtgacatttctctccatgcaccctgctccgttttagtcgtggtgacgtactgcgcgcaggaattcctggcgggtattctggctggatttaaacaggccgccgagagaggtggtggtggtggcgctggtcgcgtcgcgaatgccgcgcgccttcacgcaataatgcaccgcgtcaatggataccgccacgttgttggtgccgagcagcgtctgcagcgcgatcaggatctgctgcgtcagacgctcctggacctgcggacgttgggcgaagaactgcacaatgcggttgattttcgacaggccgatcaccgaatctttcgggatataggctaccgtcgctttaccatcgatggtaacgaaatggtgttcgcaggtgctggtcagggtgatatcgcgcacggtgaccatttcatcgaccttcattttgttttcaatgacggtgattttcgggaagcgagaataatccagcccggagaagatctcatcgacatacattttggcgatgcgatgcggggtctccatcagactgtcatcactcagatccagattcagcagttgcataatctcggtcatatgaccggtaatcaaacgcttgcgtgtttcgttatcaatttcttgtactggcgcacgcatcggcgtctccagcccacgagcgaccagcgcttcatgaacgaggacggcttctttactcagtgatgacatttatgtttctcctgcaggtgtggcgctctttgctttttctgggggcaaagtttgtattcattgtgcgtgaggtggcgcacagaatccagtagccgtaacgataattattgaaattggcgctgccttttattagggagcgaagccatgcctcaggcgcaacgccaaatccttatcgccgtatccggaatgttccaaccgctgtacgcattcataagcgccgtcgctacaccggcatgttggctataagttgcattaatgatgcagtaagttctcaaaaggagaaagtgaaagttgctcaccggctaatgaaatatctgtattatgaacgtttacgcgcacatcccttccgaggagccttgcatggaactgcttgaagagcatcgctgttttgacggccagcaacaacgctggcgtcatcactcccctgtcctgaactgcgccatgacgttcagcatttttttaccgcctgagcgcgaaacgccgccgccggtgctgtactggctgtcggggctgacctgtaacgatgagaactttaccaccaaggcgggcgcccagcgcattgccgccgagctgggcatcgcgctggtgatgccggataccagcccgcgcggtgacgaggcggccaacgacgacggttacgatctcggacaaggcgccggcttctacctgaacgccaccgaggcgccctgggcggcgcactaccgaatgtacgattacctgcgtgacgaactgcccgcgcttattcgtagcgagtttagcgtcggcgaacgctacgccgtcagcggccactcgatgggcggccacggcgcgctcattatggcgctcaaaaatcccggccgctacgccagcgtctccgccttcgcgccgatcgtcaatccctcccaggtcccgtggggcaagaaagcgtttaccgcctatctcggcgcggatgaatcggcatggcactcctgggacagctgcgcgctgatgcaggccagccggccggaggacgccgtgccgacgcttatcgatcagggcgacaacgatcctttccttgccggacagctgcagccggcggtactggcggaggtcgcgcggcagaaggcctggccgttaacgctgcgcatccagcccggttacgaccacagctattactttattgcctcgtttattgaagaccatctgcgcttccatgcgcagcatctctttggctaaacgccaatgcgccgcgaagctgcttcgcggcgcatgttcaggcctacaggacgcgttttagcgccggcaatcagaagcgataatccaccgccataaagtagcgacggccttcttcggtatagctgtagtcgtcccggctcagatctttatcacccacgttctgcaccccggagcgcagtttcacgtttttggtcacctgccatgccgcgccaacgtcaaacagggtgtagccgcccggcgttttgccggtggcgctcaccgcgcgctgctggccggtatagttggccgtcacgtagaaggaccaatcgtccagcggtttccagtcgagcgtgccgttggcggtatggaacggcagcgtctgcagcggtttgtcgccgccattgctcagatcgcgaccatcgttgtatgtgtagttcaccgtcagcttccactcatcgccaaacgggatcttcacctccgtctccacccctttgatgcgggctttgttgacgttgaaatagcggaagatcggcacgcgcttgccgttgacggttttccagccgacaaagttcgggtagcccggcgcttcgctggcgctggaggtgcgcagaacgtcgatcatgtcgtcgacattattctggaaggtggtgatgctgccttcgacattttcaagccagccctcttccccgcggtagtagagaccgagctcgaagctttcgctggtttccggtttcagatccgggttaccgacgatgctgcacgagccgcgacaggagttggtggtccagtcggggttaagctgcagcagcgacggggctttaaacgccgtcgcccagccgcctttgacggtgacggtatcggtggcgttatacaccagataggcgcgcgggctccagtgatcgccataggtctgatggtcgtccatccgaatgccggtggtcagcgccagcggctcgatgatgcgccattcgtcttcgataaacagggcgtactggctggccgacgttgactggccgccgctgctcaggttgaccggatctttcagtttgtcgtggcgccattcgccgccgaaggtcaccagctggttaatcatgtccagcggcaggacatacttgccgtcgatggcattgctttccgaggtaatagtcccgctctgccctggatttttgttatccaccttttcgccgtagaacttgagctcgctattgccgatatcccagcggccgttatggctcagagagtagttctcccgctcaaggcggttgcggtcaagggaatcggaatcgcgatcctgacggtcaaagccgtagcctgcggtaaaatcgtggttttcgttcggcgtccaggcgaattcaacattgccatcgcggctggtgaagccctcgatgcgcggcgtctcgccggtggcattactggatgactgcggatcgtccttggcgcgttttgccaggctgccgtaggccttcattccaagtacgccgtcgatcagcgggccgctggtgaagaactggccgttataggtatccccgcgatcgcggtgctcctgaatagtggtatcagcactcagcgtcccggtccatttctggccgatttttttggtaataatgttgaccaccccaccgagcgcatcggagccgtaaagggaggacatcgggccgcgcaccacttcgatacgctcaatagcatccaccgggatccagttaaggtcgaagtcattgtggcggaagacggcgttccgcgagttaacgcgcttgccgtcgaccaggatcagggtatagctgctgctcagaccgcggatgctaacgcccttgcggttatccccttcgttggtgagctggaccccaggcacatcgcgcagcacgtctttcaggttctgaacaggcttgcgttgtaaatcctgttgggtgatgacgctgatgctcgccggcgcgtctttgacattctgttcagtggccgaggcggtcaccaccagcgtttcttcattcacatcggccagagccggaaacgccaacgatacgacggacgcagacaatcccgcccggataaaagggtttaacctgaacattccaaatctccatgaggtgtacaaccaaacaaacaacaaggtgctgctcacacgcgctggcgacttgccgctctgtcggcggcatgctcgcgctgttttctcgtcgatgtggctggtcgcccggtgtcagtctgtacaagcggcagagacggggagtggcttcatccgtaatgggcgaaaatgataaagataatgattacgattatcaatataattatgaagaattgtgacaagctgtaaccgcacaaacataaaaaaagccctctgttcagagggcttgcgggtgatgacaaatctgtcttcgttattgtgctcacatgtctgccgggtggcggcttccgccttaccaggcctacgaaacatcgcaatatcaatcagttacgcggttatctgtaggcccgcgcaagcgcagcgccgccgggcaatccctgaagattgcactttgccagcaatataaagccctcttcacagagggcttttatcgcacaatcgcgaagattaacgcttaaagcggtccgggaaggtcatttcgctgtagcgaacaaagcgggtgcctttcgccagcttgtaaccaaaccagatgacgaggaacagcggaataccaatgtaggtcgccgccacgccgccccagtcaatagtgtccttgaggaacgcttcgtagttctgtccgagggtgatgatcaggcacagcacgaaggcgaagatcggccccagcgggaagaacccggaacgatacggcagattattaatatcgttaccctgcaggacgtagccgcgacggaaacgatagtggctgatcgcaatacccagccaggcgataaagcccgtcatcccggaggtgttcagcagccacaggtacaccgtctggttgccaaacatggaagtcaggaagcacagcgccgcgatcacggtggtcgcgtacagcgcgttacgcggcacgccgccacgcgacagcttcgagaaaatacgcggcgctttaccgtcgcaggccagggtgtacagcatacgcgtggaggcgtacatcccggagttacccgccgacagcacggcagtcaggataacggcgttcatgattgccgccgccgacagcaaaccagcatgctggaacaccagggtgaacgggctgacggagatatccttcacatcgttgcgcagcagactcggatcggtatacggaatgatcaggctgataatcaggatcgcgaagacgtaaaacagcaggatacgccagaagacctggcgcaccgcgcgcggaatgttcttctccggattttcagattcaccggcagcgatgccgataagctcggtgccctggaacgagaagccgacaatcatcgccacgccaatcatcgccgagaaaccgccggcgaacggcgcatccgcgatcccccagttgctccagccggctggctgcgcccctttgaagatgccgacaatcatcatcacgccgacgatgataaagataatgacggtggccacttttatcagcgagaaccagtattccgcctcgccaaagccgcgcaccgagatccagttcagcaggaacatgatgccgaggaataaggcgctccagatccagcccggagtgtcggggaaccagtagctcatcaccagctgtgaggccacgaggtcaacggcgatcgtcaccgcccagttgtaccagtagttccagcccagcgcgaagccgaagccttcttcaacataattctgcccgtaggtggcgaaggaaccggataccggcataaacgccgccagctcgccgaggctggtcatcaggaaatagaccatcaaaccgatcagaatataagacagcagcgccccgccgggacctgcttgcgaaatggttgcgccagaggcaacaaaaagacccgtaccgatggaaccgccgatggcgatcatggtcaagtggcgcgccttcagttcacgacgtagcgtgggcgcttctgtggttttagtttccgaaaccatgtgataatgctatccatccaaaaaatgaggcgcgattgtagcagacgatcggggttccatccggtacaaatgcaaagttataagagagcttcatgatcgcccgcaaattattagtaaagcactaacctgcggaattgccagcgaattccccccgtaatcaggcgataaaaccgggctgctacacctggcaatagtgcagaaaacgttgtaatgctttagaaatatgcttctgccggtgatggatccgccacagcgtgcgcgtcagccggggcaatggcactttcagttccgccagcgtgcccgaggcaagctgttcggcaatcacccgccgcgatagacagctgatgcccaggccatgcctgaccgcgtgcttgatcgcctctgaattacccagctccatgcccagatgaaacgccggcagatgcgacagcagaacgtaatcgacaatctcccgggtgccggagccatgctcgcgcaggatccacggcgcctcggccagttgctgcagggtcacctcccccgccagcagcggtgagttgggcgcggcaaacaccaccagctcatcctccagccacggctcggcaataatatcggcggcatggcacggcccctcaatcaggccgaaatccacccgcaggtcggcgacggcgttgatgacgtccaggctgttgccgacgctcagctcgaccggcagatccgggaagtcatgacgatagcgggcaataatctccggcataatatagttgccgatggtgctgctggcgtagactcggatcgccccgttatcgccgcgaaacagctgctcgatctccagggcccgctccagcagcgccagcgcacgcgggtacagcagccgtccatgctcattcaccaccagtcgtttaccgacgcggtcaaacagctgcacgccgagctgcccttccagatcggtcagcgcggcgctgaccgcggattgcgaaagcgccagcatctgtgacgcctgagtggtcgacccactcttgtggacttcggcgaacacttccagctgccgcagcgtaatatgcataacccacccgtttagtaatccaacctgaataaccttccttactatggtgacacaaatcgaggcggctgacggaaggaaaatccgcttatatcacaaaatcatcgtcttgccggcgagaccgccccgcttctgcctaacccgctctcgccccgttgtaaccggcgaagcggccattaaccacttattacgattgattataaacatataatcaattttatatttaatcccgcgcggcgtaacctttaggcagacaaaggagaaggttatgacagcactcactttacccaccaaacatcgttccctgtggcattttgtcccaggcctggcgctgaccgccgctctgaccggcgccgcctgtggccggtagtttcccggccatcgccggcgcaggctttagcgccctgaccctcgctatcctgttcgggatggtcgtcggcaacacggtctacccgaaaatctggcagccctgcgacggcggggtgatcttcgccaagcagcatctgctgcgcctggggatcatcctctacggctttcgcctgacgttcgcccagattgccgacgtcggcgtgagcggtattttgattgacgttctgacgctctccagtacctttttcatcgcctgcttccttggccagaaagtgtttggtctcgataaacacaccagctggctgatcggcgccggcagcagcatctgcggcgcggcggccgtgctcgccaccgagccggtggtcaaagccgaagccagtaaagtgacggttgccgtcgctacagtggttatcttcggtaccatcgccatcttcctctacccggcgatgtacccgctgctggcgcactggtttaccccggagacctacgggatctatatgggctccaccatgcatgaagtggcgcaggttgttgccgccggccatgcggtcagcccggacgcggagaacgcggcggttatcgccaaaatgctgcgcgtcatgatgctggctccgttcctgctgttcctggcggcgcgtgttaaacagctgaccccggcaggcaacggcgagaaaagcaaaatcaccattccgtggttcgccattatgttcatcctggtggcggtgtttaactccttccatctgctgccgaaagccgtggtggatatgctggtgacgctggataccgtcctgctggcgatggcaatggccgccctcggggtcaccacccacgtcagcgcgctgaaaaaagccggggcgaaaccgctgctgatggcgctgatgctgttcgtctggttgattgtcggcggcggggtcattaacgtcgctatccacagcctgatggcataaagcactacatctttctccagttaagccgctatcattacccaccccccagcggctttaactggagttttttttatgaaatacgtaggagcgcacgtgagcgcctcaggtggactggccaatgccgccattcgcgccgccgaaatcgaagcaaccgccttcgccctcttcaccaagaaccagcgccagtggcgcgccgcgccgctcagcgacgagaccatcgccgaattcaaagccgcctgtgaaaagtatcactttggcccggggcagatcctgccgcacgacagctacctgattaaccttggccacccggtggaagaagcgctggaaaaatcccgtgatgccttcattgatgaaatgacccgctgccagcagctgggactgacgctgctcaacttccaccccggcagccatctgcagcagatcccggaggaggagtgcctggcgcgcatcgccgaatcgatcaatatcgcgctggcgaagaccgaaggcgttactgcggtgatcgaaaacaccgctggccagggcagcaacctcggctttaagttcgagcacctcgcggccatcatcgacggtgtggaagataaatcccgcgtcggcgtctgcatcgatacctgccatgctttcgccgccggctacgacctgcgcagcgccgaagcctgcgaaaaaaccttcgccgccttcgaacgcatcgtcggttttcagtatctgcgcggcatgcatctcaacgatgccaagagcgccttcggcagccgggtcgaccgtcaccacagcctgggggaaggcaacatcggccacgattgcttcagctggatcatgcaggacagccgcttcgacggtattccgctgattctggaaaccatcaacccggatatctgggcggaagagattgcctggctgcgggcgcagcagattgccgaagtggcgtaaatagagacaaaaaagggccgaacagtcggcccttttttattgcggtaggattatgccgctttttcaacttccgctgtttgcgcctcagggcgtttcagcacggcgtaggcaaggcccgccaccagcgttccggcaacaatcgccagcaggtagcccagcaccggcgtaatcgcccccgggatcagcagaacaaacagcccgccgtgcggcgccatcagtttcgcgccgaccgccatggagatagcgccggttaccgcgccgccgacgatgcagcacggcagaacgcgcatcgggtcacgggcggcaaaaggaatcgccccttccgagataaagcacaggccaagaaccagcgcggctttacccccttcccgctgccctttgtcgaacttattgcgcgctaccagcgtcgcgatacccatcgccagcggtggcaccataccggccgccatgatcgccgccatcggcgcataggtctgggtactcagcaggccaacgccaaaggcataggccgctttgtttaccggcccgcccatgtcggtacacatcatcgcgccgaggatcgcgcccagcagaaccgcgttggcggtgcccatggtttgcagccagtgggtcagccaggcgaggataccggctaccggtttaccgatcagatagatcattgccaaacccacgatcagactggagaccagcggaatgatcaggattggcttcagggcttccatactctgcggcagtttcagcttcgtgctgatggctttcgccacataaccggcaaggaaaccagcgatgatcccgccgataaagccggagccgccgctaaccgccagcataccgccgataaggcccggggtcagacccggacggtcggcaatggagaaggcgataaagcctgccagtaccggcaccatcagcgcgaaggccgagccgccgccgatctgcatcagcgccgccgccagggtgtctttcacttcaaacgctttgatcccgaaggcaaaggagagcgcgatacacaggcccccggccactaccatcggcagcatataggagacgccggtcagcaggtggcgataggcgcccgccgactcttttttcccttcagcagccgcctgaggtttgccggatggctggtacggtttggcttccgccaccgctttatccagctcctgggcggttttcttcagcgccagaccggtggtggtgcggtacatcggcttgccggcgaatttcgccaggtccacctcgatatcggcagcgacgagcaccagatccgcctcggccacctcttccggggtgatggcattgcccgccccaacggagccgcgggtctccaccttcacccaccagccgcgttttttggcttcggtttcgatggcttctgccgccataaaggtgtgggcgacgccggtcggacaggcggtgaccgcgacaatgcgtttctgcccctgagcggcggccggaacggctaccgccgctggcgcaacgtagggcttagcgtggtctttcgcttctcccaggaacagctccggatgggcgacagcacggttaatatcgcccaggtaaacgtttttaccattcagcgcgctatcggccggcagcgcggttcccagcacgatggccagttcggcgtcattcgggttatcaatcagctcaaggtgcgctttcggcgccgcggcacccagcagggttttcgccatgtaggcgcgcgcctgtccgagtccggcatcaataatcagcagcgttttcattatgcctctcctgctgtcaattaaagggttgtaagtcgacgcgcgccatcatcgcggccaactgggtacggtcggtaattcctacattgctctggctgacggccagggcagcgacggcggtcgccaggcgcagggtatgctcgctggattcacgcatcagcaggccgtaaatcaggccgccgaccatcgaatcgccggcgccaacggtactgactacttccactgaaggtggtttagcaatccactccccagaggcgttgacccacagcgcgccctcttcgcccagggagatcaccacgtgggcgataccctgctcgcgcagcgcatgggcggcgtcgataacatctttcatctccggcagcttgcggccagcccagatttccagttcgcgacggttcggtttcaccagccacggcgccgcttttagtccggcaaccaacgcttcgcggctgctgtcgaaaatgatgcatgggcactgactgcgcagacgggtcatccagtcggtgaaggcttccgggctaacgccggacggcaggctgccgctgacgcagaccatatcgaactgcccgagccagctcagggagtcgttgacgaagcgttcccagtcgcccggggtgacttcaaagccggagaagttgaaatcggtcacttcgccatctttttccgtcagcttaacgttgatacgggtccggccctgcaccacctggaaacggttggcgatccccagctcgctgaacagctgctgaaagccgtcctggttgtctttacccaggaaaccgccgacggtgacgtcaatgccgagatctttcagcactttcgccacattaatgcctttcccggcggcgtgcaggccggtggtgcgcaccaggttcacttcgccgcgttcaatctccggggtgaatcccaccaggtcgtatgccgggtttaacgtaatcgttgctacacgtctgctcatttatgcgccctccccaaggcctgcggcgatcgcttcgccaatcgcatccagcgcttgttgcgcatcctcaccctgcgcggtaaaacgcagacggtgaccttttttcacacccagcgccacaaccttcatcaggctgcgaccgttagccggcttgccggaaccgtcgagattggtgacggtgatgtcgctggaaaattgtttaatggtgttgaccagcatggtgcccggacgggcatgcaggccgtgttcattgcgcaccacgaattcggcgctcagcacatcttcggcaatggcgtcgtcgctggtcagcagcgccagcacggtggcggcgtcggctttcagcaaatgttcagctttcttgtccagcagcagcttgctcagacggttcagcactgcggtcggctgctcgtcggccatcgccaccgtgaccagcagggaaaccggctgctcgtcgcgggtaaaggcgttagccgcgcggctgaccgccacggcgctgcgcaaattgccttccgcactgtcgttcagccagacgccctgaccgaggttcagcggcgtatcgttaatgacgtggctaacgaaggcggcatcgacagcgccaacttctttcagacgcgccgcgttcagcgcctgcagggtcagcagatcgctggccgcgacgtcgagactgagggtctcgttatccagcttcagcgcttcgctctgcttctctcccatcagcagcgcgcgcagctcttccgcggtagtggcggactgcagctgcgcggcgaccgcgtcatcgctcagcacatgggtcagctgacgcagcaggccgaggtgttcatctgagctggcggcaatcccgatcgccacataggcggtctgcccttcgccccaggtgacgccctgcgggaactgaaacacctgaacgccggtcttcagcacctggtcacgcgtatccgtcgtgccgtgcgggatcgcgatcccgttgccgaggaaggtcgaggtctgctgctcgcgcgccagcatgccgttcacgtagccatcggccacgttgccggcgctgaccagcgcggcggcgacctgccggatggcctcttctttattaccggcctgctggccgggatgaatatcctgcacagataactggaacatggttctcctctcctgctgaattgaatcgtttcagctaacttgagaaaaaaggcgccatctgacggggaacggattgccgaatgacgctgaaacgtttcaagaattttgtacctttcttgctcaacgcgcaaggtacgtcagcgacttgatcgcagaacttagaggtactgcacacttttgctgaagctttagctatcgaccgcctcgaacgtcagctttttgctgaaccctatattttgaaacgcctttttaattattcgtgccatactactgtttatttttagccagcaggcgtaaactccgcgccgtctcctgaaactacagaaaaccaaacccatggaaaaccgtagcgccgctctcccccgacgcgggttcgatgtcacctcttccgccttcttaatcgtcgcctttctgacgggcattgccggggcgctgcaaaccccgaccctgagcctgtttctgaccaacgaagtgcacgtccgcccggcgatggtcggtttcttttttaccggcagcgcggttattggcattctggtcagtcagttcctcgccggccgctccgaccgtcagggcgatcgcaagcagctgattgtcgtctgctgtctgctgggggtgctggcctgcgtactctttgcctggaaccgcaactatttcattttgctgttcatcggcgtttttctcagtagctttggatcgaccgccaacccgcagatgtttgccctcgcgcgtgagcatgccgacaggaccggccgcgaagcggtgatgttcagctccattttacgtgcccaggtctccctggcatgggtgattggtcccccgctggcctacgccctggcgatggggtttggttttaccgcgatgtatctcagcgccgcggcggcgtttatcgtctgcgggatcatggtctggctattcttgcccagcatgcgcaaagcaaagccggtagcgaccggccggctggaagctccgcgcacgcaccgccgcgatgcgctgctgctgttcagcatctgcaccctgatgtggggtactaacagcctgtacatcattaacatgccgctgtttatcattaacgagctgcatctgccggagaagctggcggggctgatgatgggcaccgccgccggactggaaattccgaccatgctgattgccggttactacgcccggcgtttcggcaaacgctttctgatgcgtctttctgcagtggccggggtgctgttttacgtcggcatgctgacggtgcatacgccagcgctgctgctggcgatgcaggtgctgaacgccatctatatcgggatcctcgccgggatcggcatgctctatttccaggacctgatgccggggcaggcgggcgcggccaccaccctctataccaatactacccgcgtcggctggatcatcgccggttcactggcgggggtagtggcggagatctggagctatcacgcggtgttctggattgcgctggcgatgggcgttgtcactcaggcctgcctgtggcggataagagacgtgtaagcacattggtttccatccctctcatctgctgcgttgagctcagggcgcggtggccagctcaagctccagcagccaggtgatcgcttcatcgcggtgggtgaggcacatctccggcgagggctgcaggctggcgcacaccttcgggcgcagaggggaaccgaaaataaggcataaattgcgctcggaaagctggatacaacgggtgttagccggcttgccctgcggcatgccggggatcggcgatgatatagagggggcgatgcaacatgcgccacaatcagtacgacattccacaacccgactcccaaacgctcattttgcgccacagcctaaacgttttgccagaagatagcaaaactcgcgaaatccgcttgcctgaacgcccgggcgcgagtagttttacgcgatatttttgactcgttaagtgacaggattactgcaatgccaagagcgaatgaaattaaaaaaggtatggtgctgaattacaacggcaagctgctgattgtgaaaaatattgatattcagtcacccagcgcccgcggtgctgcgacactgtataaaatgcgcttctccgatgtgcgcaccggcctgaaagtagaagagcgcttcaaaggcgacgatatcgtcgataccgtcaccctgacccgccgtttcgtcgacttctcctacgtcgatggcaacgaatacgtgttcatggataaagaagactataccccttacacctttaccaaagagcagattgaagaagagctgcagtttattccggaaggtgggatgccggacatgcaggtgctgacctgggacggccagctgctggcgctggagctgccgcagaccgctgacctggaaattatcgaaaccgcgccgggtattaaaggcgcgtccgccagctcccgcaccaagccagccaccatgagcaccggcctggtgattcaggtgccggaatacctgaccaccggtgagaaaatccgcattcatatcgaagagtgccgctatatgggccgcgcggattaatcatcggtaacgccccgacagtaaaaaaggacagcgctggctgtcctttttattatccccattgccgcgattacagcagttcagggtatttggtcattttcagcgccagctcgacgccgcgcacttccgccatccccttgagacggccaatcgccgaatagcctgggttggttttcttgcgcagatcgtcgagcatctgatgaccatgatccggacgaaatgggatcgggcgcagatcgccggcctgtttacgccgctgctcttcacgcaggatagcatccaccaccgccaccatattgacgtcgccgctaaggtgcgccgcctcgtggaaggtttttgggtttgcttcacggcaggtagagcgcagatgggtaaaatggatgcgatcgccaaaggtctccaccatcttcaccagatcgttatcggcgcgaacgccatacgatccggtacacatggtgaagccattattaatgctgtccaccgtctccttcagccactgcatatcttcgatggtcgacacgatacgcggcaggccaaggatcggccgcggcggatcgtccggatgcacagccaggcggatccctacctcttcgcataccggcacgatggcgcgcaggaaataggccatattttcacgcagctgcgctttatcaatgtggtcgtactccgccagacgcgcgcggaactggtcaagggtgtagccctcttccgctcccggcaggccggcgatgatattgcgagtcagtttatcgatatctgcttcgctcatcgccttgaaatagacctcagcctgacgctgctcttcttcactgtaatccgcttccgctcccgggcgtttaaggatatgcagctcaaaggcggcgaaagcgatctgatcgaaacgcagcgcccgggagccgtccggcagctcatattccagatcggtgcgcgtccagtcgaggatcggcataaagttgtagcacacggtatcgatgccgcaggccgcgaggttgcggatgctctgctgatagttggcaatccaggtcgcatactgcccgctgtgggttttaatatcctcgtggacgggaatgctttcgacgaccgaccaggtcaacccttttgccgctaacagcgcctgacgcgctttaatctcgtcgaccggccatacctgaccgtttgcaatatggtgcagcgcagtgacgacgccggtcgcccccgcctgccgtacatcatcaagcgataccggatcgttcggcccataccaccgccaggtttgctccatcgctatgtcctcacaaaagttgttataccaataatggcgacactcatggcgactaccatacatgtttctcacctggctgcaaacagtgctggcctattgattgatccagctcacagtcagcggataatttcggcttaccaatttaacttcctgtcatataactttagactggcattgttaataagcagttaaacaggtgtgggaagaatgacaacaattgcaaccgctacgctaccgaagaacgtgcaataccctcaatacgatcgcagccagctccgctcgcgtattgtccatttcggctttggcgcgtttcaccgcgcgcaccaggcgctgctcaccgatcgcgtgctgaataacgtcggcggcgactgggggatctgtgaaatcagtctgttcagcggcgacacgctgatgagccagcttcgcgaacaggaccatctgtttaccgtgctggaaaaaggcgccgacggcaaccagcccattgtgatcggcgcggtgcacgaatgtctgaacgccaggctcgattcgctggcggcgattatcgaaaaattttgcgagccgcaggtagcgattgtctcgctgaccattacggaaaaaggctactgcatcgatccggcgaccgggaaactggatccgacgcatccgcgcattattcacgatctggagaatccgacgctgccgcagtcagctcccggtattttagttgaagcgctggcccgccgccgggaacgaggccttccgccctttaccgtgctctcctgcgataatatccccgacaacggtcacgtggtaaaaaatgccgtcctcggcatggcggaaaaacgcagcccggcgctggcggactggatcgccgacaacgtcagcttcccgggcaccatggtggatcgtattgttcctgcggccacaccggagtcactggcggaaatcgccaccgtgctgggggtcgacgatccctgcgccatcagttgcgaacccttcattcagtgggtggtcgaagatcactttgtcgccgggcgacccgcctgggagacggcgggcgtgcagatgaccgatgacgtgttgccctgggagcaaatgaagctgcggatgctcaacggcagccactctttcctcgcctggcttggctatctggcagggcatgcgcacattagcgactgcatgcgggatgaggtcttccgccgcgccgcccgccagctgatgcttgacgaacaggctccgacgctgaccattaccggcgttgatctgctggcctatgccgacagtctcatcgcccgcttcagcaatccggcgctcaaacaccgcacctggcaaatcgccatggacggtagccagaagctgccccagcgcatgctcgatggcatccgcgtacatctggcgcgcgacagccgttggccgctgctggctctcggcgtggccggctggatgcgctacgtcagcggcacggacgacgccggtcagacgatcgacgtgcgcgatccgctggtcgacaagatccggcagcgggtggcccagagcgatgagcagcagcgcgtcgacgccctgctggggctggaggaaatatttggccgcgacctgccgcacaacgcccagtttgtcgccgggatccgcgccgcctggcaacagctggcgacgcacggcgcccgcgaggccgtcgcccgcgcgctgaattcttaacaatatttgcgcttatgcggacagaattctcttctgtccgcctcaggacttctcttttcccccttttttcgtcaggataggcgtaactgttacaacattacatttatcctggagaaaagagtgaccagaaccaatttgatcaccggctttctcggcagcggtaagacgacctcgattcttcatctgctggcgcagaagcctgcggatgaaaaatgggccgtactggttaacgagtttggcgaagtcgggatagacggcgcgctgctggccgacagcggcgccctgctcaaagagatccccggcggctgcatgtgctgcgtcaatggcctgccgatgcaggttgggctgaacaccctgctgcgccagggcaaacccgatcgcctgctgatcgaacccaccggtttgggccacccaaagcagatcctcgatatcctcaccgcggcggtgtatgagccctggatcgatctgcgcgccacgctgtgcatcctcgatccccgccagctgctggatgaaagagccgtcagcaacgacaacttccgcgatcagctggccgcggcggacatcattgtggcgaataaaagtgatcgggaaacccccgaaagcgcccgggcgctggccgactggtggcagcgctggggcggcgagcgtcgcaaagtgtcggcaatccagggcaatatcgatctgaccctgctcgatgagccacgacggaacaccgccccgctgccggcgagcgcggagcacgcccaccgccatccccccacttccggcctcgccgcgctcagcctggcggaacaccagcgctggcgccgacatctcaacaatggccagggctatcagggctgcggctggatattcgacgcggagacggtctttgacaccatcggcctgctcgaatgggccaggctggcgccagtggggcgcgttaaaggcgtgatgcgcattgccgagggggcggtgcgaatcaaccgtcagggggaggatctccatatcgagaccctcagcgtcgctccgcccgatagccggatcgagcttatttccgcgaatgaagccgactggaacgcactccagacctcgttgttgaggcttcgtttaagttaaggcggctaaggttgccgccgactgtcacaaaatcgcaatggctatgatgaaaaaccgaattcctttaatcctgctgcttaacatcgcgggtgtagcgctattttgctcctggtatctgccagccaaccatggcgcgtggttgccggtcgactccgcgatcttccatttctttaaccatggcgtcagcgtcaaccatgcttatgcctggctgctggcgatcatcaacaatcgcgccttcgacgcctgttcgctgctggcgatgggctgcctgatgctgagctattggctaaaggcgccgactgcaggccgtcgtcagatcgccatcatgggcctggtgatgctgctggcggcggtgatcatcaaccagctcgcacaacacctgatgccggtacagcgcgccagcccgtcgctgttttttagcgatattacccgcgtcagcgacgtcgttaacttccccactaaggatgcgtcgaaggacagcttccctggcgatcatgggatgatgctgctgatcttcgcgagctttatgtggcgctattttggccgtcgcgcgctgggcgtcgcgctgattatctttgtggtctttgctttccctcgggtaatgattggcgcccactggtttagcgatattgccgtcggctccctgaccgccgtgctgatcggcgcgccctgggtattgatgaccccgctgagcgataaactgatcgcctttttcgatcgctacttacccagtagaatatcggccaaataatgtctccggcagccgccagagtcattaactataaggggaccttttgggtccctttttacattttccctttttttcaacatgacgttcatcttcttgtcacattaatcccgtgacaaatgaaggaattgtctgttttttgcccgatattgccgtaattttggcctttcccgatgattcactttttgtcaccaaaatacttataagaaatcgcgcaaaaccgctcgccatgcggcgtttgatagggtaatctcgttctcgttttgccttttccgcagcattaattcagggcatgaataaaattgtgcgtgactgcacaaatttaagcttaaggaattgtctcattgcggatgggtatttaggctctaacacgtttggcattttttataacgacattgtcgttaaggacaacaagggaaaataaacagcatggtcaaatctcagccgattttgagatatatcttgcgggtagcccccgcgattgcagtagcggttctgctttccgcgtgtagttcaacaagtaccgccaggaatatgcattctgagacgcatgctgtgggtagtggcgatttatcatcactgcaagcctctcaggatgaatttgaaacgatggtccgtaacctggacgtaaagtcccgtttaatggatcagtatgccagctggaaaggcgtgcgttaccgcctcggcggcagcacccgcaagggtatcgactgctcagcgtttgtgcagcgcaccttccgcgaacaatttggtctggaactgccgcgttcaacttctgaacagcaggaaaccggaaaatcgatttctcgtgcccaactgcgtacaggcgatctggttctgtttcgcgccggctctaccggccgccatgtcgggatctacctcggcaacaaccagtttgttcacgcctccaccagcagcggggtgactatctccagcatggatgagccatactggaaaaagcgctacaatgaagcgcgtcgagtcctgagccgctcgtaaactgtcctccaccgccgccggttatcccttggctggctgcgggataaaaaacactgccccaggcagtgtttttttttgccacctggttctcaacgtcgcaaaataagctatgtcttttaagtgggaatgagaaaaacgacgaccgacactccgttgatgcgcttcaataatacggaaagaatctggctatgcttactcgctacttttcgccccagcgtaaaacctggttaaccagcctgagcgtggggatcatcgtcgcgctgttggccgggagcattcagtttatggtgatctaccataaccgggccgagcgtttcgacgccattatcaacaatgttaatacctatctgaaaagctattttcacgacctgcgccagaccattgacggcttgcagccgctggtggaccagccctgcgagaatattgactccgggcttacctcccacgccgcgttcagccccaacgtccgcgctttcctgctggtcaaaaacggcatcgccttttgctcatcggctacgggagccatgaatacgcccctcagccagctgatcccggccatcgatatcagcaaacccgttgctatggcgattttaccaggcacgccgatgatgccgaagagcgcggcgctggcgctgtgggtaggtaaacccggcgatcaaaacagcggcattttcgtgtcgattaacgctaatctcacgccgtatatcctctattccgcgcggcaaaacgatttcagtggcattgcgctggccatcgatcacaccgctatctccaccttcagtaatcggctggtggatccgcaaacgctgcataacgcgccgatccgccaggcacagatcgagggcttaccgctgaaggtctacctgtatgccaacagctggctggcggaaaatacgcagtttgctctgctgctcggggtcgtctgcggcctgctggcggggctgctctgctattacgtgctgacgatcaaatcggatccgcgaaaatccattctgctggggatcaaaaataaccagttctacatcgtttatcagccggtggttaatgctcagactctacgtatcagcggcgtggaggtcctaatgcgctggcgccatccggtggttggtgaaattccgcccgacgtttttattaacctggccgaaacccagcagatgatcgtgccgctaacccatcacctgctcgcgctgatcgccagcgacgctgcggtgttgaagcgtattctgccgcgcggcgtgaagctggggctgaatatttcccctgcccatctgcaggccgacagcttccgcgacgatatgctgcgcttcgccgccgcgctgccagccgaccactttcacgtggtgctggaggtaaccgagcgggcgatgattgataaagaaaaatcgatggctaacttcgcctggctccaccgccagggattcgaaatcgcgattgatgatttcggcaccgggcatagcgcgctgatctatctcgaacgctatagcttcgattatctgaagatcgatcgcggttttgtgcaggcgattggtactgaaacagtaacctcgccggtgctggatgcggtactgaccctcagccgtcggctgaaattaatgaccgtcgccgaaggggtggagacccaggaacaggcggagtggcttcgcggccagggcgttcatttcctgcaggggtactggatcagccgaccgctgtcgctggccgggctggtggctgcgcacgatgaacccgcgaactatttcacaacgcgctaagtctcacttatgatgcgggaacggatgtcggccatgggggccggccatgacagggtattctgccgcctatgtatgcgcgcctctttctgattctgctggctctgtttagcctggacgctaaggcgcaaaccattcaggaaagcgtagccttcgcgattatcggcgaaccgaaatacgccgccggtttcagtcattttgattacgtcaatcccagggcgccgaaaggcggcaccctcaccctggcggcgatcggcacctttgataacttcaaccgttatgcgctgcgcggcaaccccgcggtacgcacggaggcgctctacgataccctgttcaccacctcggatgatgagcccggcagctactacccgctgattgccgagcgggcgcgctatgccgaggactattcctggatggagatcgcgctcaacccgcgcgcccgcttccatgacggcacgccgatcaccgcccgcgatgtggcgtttaccttcaacaagtttatgaccgaaggggtgccgcagtttcgcctgttttataaaggcaccaccgtgaaggccatcgcgccgttgaccgtgcgtattgacctcggccagcccggcaaagagaacatgctgagtctgctgagcctgccggtgatgcccgaggcgttctggcgccagcacaaactcagcgacccgctgtcgaagccgccgctggccagcgggccataccgcatcagcgcctggcgaatggggcaatatattacctattcccgggtcgccgactactgggcggccgacctgccggtcaaccgcggtcgctggaatttcgatacgctgcgctatgactattatctcgacgacaatgtcgctttcgaagcctttaaagcgggagccgtcgatcgccgggaagagaccgtcgccaaaaactgggctacccgctacgtcggtcgcaacttcagccgcggctacatcattaaagatgagcataccaatacctcggcgcaggatacccagtggctggcgttcaatattcagcgcccgatttttgccgatcgccgggtgcggcaggccattaccctggcgttcgatttcgaatggatgaacaaggcgctgttttacagcgcctatcagcgcgccaacagctatttccagaacaccgaatatgccgcccgcagcctgcccgacgcagccgagctggccctgctgacgccgatgaaaaaagaactgcccccggagctcttcagccaggtttaccagccgccggtctcccgcggcgatggcttcgaccgcgccaacttactcaaagccgacgccctgctcaatgcggcgggctggacggtgaagaaccagcgccgggtcaacgccgccaccggcaagccgctgcgctttgagctactgctgccggccgggggcaatgaccgctgggtgctgccgtttcagcacaacctgcagcgtctggggatcgtcatggatattcgtcaggttgataattcgcagtacagcaaccgccgccgcagccgggattacgacatgatgccaagcctgtggcgcgccatgccctggccggggaccgacctgcaaatctcctgggcgtccgactatattcactccagctacaacgcgccgggggtgcaaagcccggtagtggataagctgattgcgcagatcctgcagtggcagggcaataagcagaaactgatccctctcggtcgggcgctggatcgtgtgctgacctggaataactacatgttgccgatgtggtatatggcgcaggaccgcaccgcgtggtggaataagttctctttccccgcgacccgccccatctattcgtccggcctcgatacctggtggtacgacgtgaacaaagcggccaccctccccgcggacagacgctaaggacatcccatgggcagctacctgatccgccgtttgctgttagtcatccccaccctgtgggccatcatcaccattaacttttttattgtccagatcgcgcctggcggcccggtcgatcaggccatcgccgccatcgagtttaatcagcgcggcgggatgccgggggctggcgacggcgggatgggcgccagccattcccgcaccggcgcaggcaatatcagcgagggtcactatcgcggcgggcgcggcctcgacccggaagtcatcgccgagataacccaccgctacggcttcgataaacctctccatgagcgctatctgaagatgctgggcgattatctgcgctttgatttcggcgacagcctgtttcgcagcgcctccgtgctgcagctgattaaagacagcctgccggtctcggtgagcctcgggctgtggagcacgctgattatctatctggtctccattccgctgggcatccgcaaagcggtcagcaacggcagccgctttgatatctggagcagtacgctgattatcattggctatgcgatccctgcctttctgttcgccatcctgctgatcgtgatttttgccggcggcagctatttcgacctcttcccgctgcgcggtctggtctcgccaaatttcgacaccctcccctggtatcagaagatcctcgactacctgtggcacatcaccctgccggtgctggcgacggtaattggcggctttgccgcgctgactatgctgaccaaaaacagcttcctcgacgagatccgcaaacagtatgtggtcaccgcccgcgccaaaggcgttggtgagaaacagatcctctggggacacgtgttccgtaacgccatgctgctggtaatcgccggcttcccggccacctttatcagtatgttctttaccggctcgttgctgatcgaagtgatgttctcgctaaacggcctgggtctgctgggctatgaagcgacggtctcccgcgactatccggtgatgtttggcacgctctatattttcactctgattggcctgctgctgaatatcgtcagcgatatcagctatacgctggtcgacccgcgcattgattttgagggccgctaatgtctttcttcagtcccgttaatcaggcccgctgggcgcgctttcgccacaaccgtcgcggctactggtcgctgtggctgtttttaattctcttcctttgcagcctgggcgccgagctgctggccaacgaccgcccgctgctggtgcagtaccggggccagctgtacgtcccggtgttaaaaaactacaccgagcaaaccttcggcggcgcgttcgccaccgccgccgactatcaggatccctggctgcagcagcagctggcgactcacggctgggcgctatggccgccagtgcgcttcggcgcgacgacaattaattttgccagcacggttccctttccatcgccgccctcggccagcaactggctcggcaccgacgccaacggcggcgatgtgctggcgcggatcctctatgggacacgcatctcggtgctcttcggtctgctgctgacgctgttctccagcgtgctgggggtgctggccggagcgatacagggttactacggcggtaaaatcgacctgtggggacagcgctttatcgaagtctggtccggcatgccaacgctgttcctgatcatcctgctctccagcgtcgtgcagccgggcttctggtggctgctggcaatcaccgttctctttggctggatgacgctggtgggcgtggtgcgcgcggaatttctccgcacccgcaactacgactatgttcgggcggcgcaggcgttaggggttagcgaccggcagatcatcctgcggcatatgttgcccaacgcgatggtggcgaccctcacctttctgccctttatcctgtgcagctccattaccaccctgacgtcgctggattttctcggcttcggcctgccgctcggctccccctccctcggcgagctgctgctgcagggcaaaaacaacctgcaggcgccctggctgggcattgccgcgtttctctccgtcgccgtgctgctgacgctactgatttttattggtgaagcggttcgcgacgcctttgatcccagtaaggcggtgtaatatgacccacccgctgttagctatcgacaatctctctattgcctttcgccagcagggtgagacgcagaccgtggtgcacaatctgtcgctcgaggtggcggtcggagaaacgctggccctggtgggcgaatccggctccggtaagagcatctccgccctgtcggtgctgcggctgctccctacccccccggccagctaccccagcggtgacatccgttttcatggccagtcgctgctgcatgcggatgaggcgaccctgcgcggcgtgcgcggcaaccggatcgcgatgatctttcaggagccgatggtatcgctcaatcctctgcacaccctggaaaaacagctctacgaggtgctgtcgttacaccggggaatgcgcaaacaggcggcgcgcggggagatcctcgactgcctggagcgcgtcgggatccgtcaggcgccgcggcggctggcggactatccgcatcagctctccggcggcgagcgccagcgggtgatgatcgccatggcgctgctgacgcgcccggagttgctgatcgccgacgagccgactaccgccctggacgtatcggtgcaggcgcaaattctgcaactgctgcgcgagctgaagcaggagctgaacatggggctgctgtttatcactcataacctgagcatcgtccgccagctggctgaccgggtggcggtaatgcagaacggccgctgcgtggaacacaatgactgtcgggcgctgttcagcgcgccagcgcatccctacacccaacgcctgctggatagcgagccggacggggagcctgtgccgctggccgccgatgccccggtgctgctgcaggcggacgatttaaaggtggcgtttcccgttcgcaaagggatcctgcgtcgggtggtcgatcatcatcgggtggtcaacagccttagctttcagctgcgcgccggcgagacgctgggcctggtgggggaatcgggttccggtaaaagtaccaccggcctggccctgctgcgcctgatcccgtccgggggcaagataaccttcgccggccagccgattcagggccgtaaccgccgacagctgctaccgctgcgccgacagatgcaggtggtttttcaggatccgaactcgtcgctcaatccgcgcctcacggcgcagcagatcattgaggaaggcttgcgcgtccaccagccgacgctgacggcggccgaacgcgaacaggcggtgatccttgccatgcaagaggtcggcctcgacccggccagccgccagcgctatccggcggcgttctccggtggccagcgacagcgtatcgccatcgccagagcgttgatcgtcaaaccgcagctgatcgtcctcgatgaaccgacctcatcgctggacaaaaccgttcaggcgcagatcctgaacctgctgaaagccttacagcgaaagcatcagctggcctatatttttatcagccatgatttaggcgtggtgcgggcgctgtgtcaccaggtgatggtgctgcgtcagggagaggtggtcgaacagggcgagtgcaagtccgtcttcagcgcaccccggcatgagtatacccgccagctgctggcgctaagctgacggtcagaaagggttattgccggagaagggctcggcgatggccacgccaaagtttttcagacgacaggtggcggcaaactcatcctgcaggttaacgaacaggcagggttcaccttcgcactccagcacggaacagtcgacttcgatgtcgcttaacgcctggctgagcttatgcatcaccggccaggctttctcaccgtccgggctcagcaatttcagggcaacgagactgttctcgttctgcgcgccgttttgcggaatcggttcaactctggaacccgcaaaaccggccagccagcgatagctctgcggcagacggtgtacgatagagagttgttgtgtattcacttagtttccccggaagcaaaaggcttcacaataaatttacatcaatattaacacactgttgacaaatagtcctgccttgaggcagaaaacgtttacagcggcggcggaccagggttaagcgcttataatccagcgctttattttttatacccggcgagccgattggcgctatatgtacccgtttctgtgatccaaaacaacttttttatcgcaacaatgcgactttttacactaattgattttacataaaggaaacaaatcgcagaaccctgaagcccattgcggttgacatgcatcaagaaaggggcgatttcgcccctgaaaatgtgacctagcgtgcgatttttcgccgccgggatgcgtaaagcgagaagaaaatagagcaggttgcgcagaaggcaatagagatcagcatcggccaggcggtggtaaacgtcgccatcgacagcagcgcgccgataatcgccccgataccgaaacggaaagtccccgccagcgacgaagcagtgcccgccatatgcggaaactcatcgaggatcaccgccatggcgttagacgacaccatggatacgcagccgacaaaggccgctacgccgatcactagtgaccagaagccgacatccagcagcgcgcagaccaccatccacaccgccatggcaaactggatccacagcccggcgcggaacatacgcaacgcccctacccgccgcacaaaccggctgttgaacatggtcatcagaaacagaaaaacgatgttcagcgcaaaatagtagccaaagtgctgaggcgcgacgtggtttatattgatgtagacaaagggaccggcgctaaggaaagagaacatgcccgcgaagctaaagccgctcgccagcatatagctcagtacccgcttgtggcggaacagcgtggcaaagttacccagcgtggtgcgcagatggaacggctgacgcctttcagccggcagcgtttcgcggacaaacaggccgatcatcagcgaggccagcagggccaccagggcgaggatccaaaagatggcatgccagctgaaccagaccaacaccgccccgccgaccatcggcgccaccagcggcgcaatggtcgtgaccagcatgacaaacgacatcatgcgcgaaaactcatctttcggatagatgtcgcgcatcagggcgttaatcaccacgctggccgccgcggctgccagaccgtggaagaaacgcatgacaatcagcatatcgacggtttgcgacagggcgcaggctaccgccgccgccgcgaagaccagcgtcccgccgaggatcaccggcttgcggccaaggctgtccgccatcgggccgtacagcagctgacccagcgcaaagccgaggatataggtgctgagcgtcatctgcgcgctgccgtccgggacgttatactgggcggcgatcaccggcagggccggaagatacatatcaatagacagcggcatcagcatggccagcaggccaaggataaacacaatccccagtgaagaattctgcttcagcgtcacgttttactccgtggctgcggggcgcccacgctggcgatttccgcttccgtcagcggacgatattcacccggcgccagcgattcatccagcaggatgtcgccgatgcgttcccgatgcaggccaaccacgtggttgcccacggcggcgaacatgcgtttcacctgatggtagcggccttcgctgatggtgaggcgcacttcggtcggagtgataacttccagcaacgccggtttggtgagatctttttcgttatgcagctggacgcctttggcgaacagctcagcggtcccttccgccagcgggctttccagcgccaccagataggttttttcacagtggtggcgcggcgaggtaatgcgatgcgaccactggccgtcatcggtcatcagcaccagcccggtggtgtcgatatccagccgtccggcggcgtgcagcttatgcgccaccggctcgtcgaggaaataaaggatagtcggatgatcgggatcgtcggtggaacagacgtacccttgcggcttgttgagcataaagtaacgcgggccattctgctgggtcagcgtatttccgtcatactccacctcgtgctccggctggagcttaaaagaggcatctttcacaatgtcgccgtccacggtaacgcggctgccgcgaatttcacgcccggcaatagcccggctgacgccgagctgctgagcgataaacttatcaagtcgcatgagatttttttagcctgtcatagtgctggagcgggcaaatcgcccgaaaaagaagaatttcaccggctagtataacgggctcttaacaccactcaagggaaaagattcatggcatactattcgccagttaattagccccgtgaattcatgacttttacattacgtccttaccaacaagaagccgtcgatgccaccctcgcctggttccgtcgccataccgagccggcggcgattgtcctgcccaccggcgcgggcaaaagtctggtgatcgccgagcttgccaggctggcgcgcggccgcgtgctggtgctggcccatgtcaaagagctggtggcgcagaaccatgccaaatactgcgcccttggcctcgaggcggatatcttcgccgccggtctgcagcgaaaagagagccacggcaaagtggtgttcggcagcgtgcagtcggtggcgcgcaatctcgaccagtttcgcagcgaattttcactactcatcgtcgatgaatgccaccgcatcagcgatgatgacgacagccagtatcagcagatcatcggtcacctgcggcaggtcaatccgcagatccggctgctcggcctgacggccacgccgttccgccttggcaagggctggatctatcagttccattatcatgggatggtgcgcggcgatgaaaaggccctgttccgcgactgcatctatgagctaccgctgcgctatatgattaaacacggctatctgacgccgccggagcgcctcgatatgccggtggtgcagtacgatttcagtcgcctgcaggcgcaaagcaacggcctgttcagcgaagccgatcttaaccatgagctgaaaaaacaacagcgtatcacgccgcatattgtcagccagatcgtggagttcgccgaaaaccgcaaaggggtgatgatctttgccgccaccgtggaacacgcccgggaagtgaccggcctgctgccggtaggccaggcggcgctgatcaccggcgaaacgcctgggccggagcgggatcgcatcatcgaggcctttaaagcgcaggcgtatcgctatctggtgaacgtcgcggtgctgaccaccggcttcgacgccccgcacgtcgacctgatcgccatcctccgccccaccgagtcggtgagtctttaccaacagatcgttggccgcggtctgcgcctggcgccggggaaaaccgactgtctgatcctcgactacgccggcaatccgcatgacctgtatgccccggaagtggggacgccgaagggcaaaagcgacaacgtgccggtgcaggtcttctgcccggcctgcggcttcgccaataccttctggggcaaaaccaccgccgacggcaccttgattgaacactttggccgccgctgccaggggtggttcgaagatgacgacggccaccgcgaacagtgcgacttccgctttcgctttaaaaactgcccgcagtgtaatgcggaaaacgacatcgccgcccgccgttgccgggagtgcgacactatactggttgacccggacgatatgctgaaggcggcgctgaaactgaaggacgcgctggtgctgcgctgcagcggcatggccctgcagcacggcggcgacgagaagggcccgtggctgaaaatcacctactacgatgaagacggggcggatgtcagtgagcgcttccgtctgcagacccccgcccagcgcaccgccttcgaacaactgtttattcgcccgcatacccgcacccccggggtgccgctgcgctggataacgccggcggatatcgtgacccagcaggcgctgctgcgccatccggactttgtcgtcgcccgcatgaaggggcagtactggcaggtgcgggaaaaagtgttcgattatcaggggcgttttcgtcgcgccaacgagctgcgttaattaccggaaagctgaggttttgattgcccgggtgtcgtttggcggctataatgccgcccgcttttgcattcgcaaagcagataatccgcctgttgctgggtcgcctgtagcaggctttatatatagagagacatcaatgtttactatcaacgcagaagtacgtaaagagcagggtaagggtgcgagccgccgcctgcgcgcagctaacaagttcccggcaatcatctacggtggcgcagctgctccggttgctatcgaactggaccacgacaaagtatggaacatgcaggacaaagctgagttttacagcgaagttctgaccgtcgttgttgatggcaaagaagaaaaagtcaaagttcaggctgttcagcgccacgcgttcaagccgaaactgactcacatcgacttcgttcgcgcgtaatcgccgatagcaagttgtatggcaagcgccccggggtctcaggctccggggcgttttgttatctgcgcagccaaagctccggcgcctcgtgcacgatgtcgctaagcatccgatgcttattcattccgggcagccagagcatcaccatggtgacgttcagcccctgactgccgacctccgtcgcgatttcactgactccctgccactcgcctggccgcaaatggtccggtaaaaacccccagcccctcccctgctccagcgcatggcgcaacagggtaatttcattcatatacagcgtatggccggaaatctgcagccggcgggcgatttgatcgtcactgcgccggtgcatcactaactgcggcgtcaacgaaagattcaataacgtcagcggccgcggagcgtcgtggaacaggctgtccgccgcgtagaaacgcagatccacggtgccgagcgcccgccactccatttcgctccccagcgtgcggttgttagcctgacaaatcgccatctccgccacgccatcgctcagcgcctgctcggcttcgcgacgcgaggcgctccagcagctcaggcggatctgccgtcgggccaggttatcggccagcgcacagagaaattcacgcggcacgaagggatcgtacaccagacgcagcgcctgcccggcggtttgcggcagcgtttgcgcaaaagactcgaaagcctgcgcctgacgcaacagcagatgcgcctggcgaaacagctgctcgccctcggcagttagcgtcaggctacgtccttcacggctgaacagccggtagcccagcgcatcttccagatagtccagcagatcgcgcagcgtggtccggtctttagctaaacgaatggccgcctgcgacaggctgccggtctcagcaatcgtcgcgaaggcttcaatctgtgcgaatgaatactgtagggttttcatcctttttctcccttaagggggaaaatcccccatgtgctgattttagccggcgcgcgccgatttatatactgcgcagcgaatctatggcaaacgaggaaatgacaatgataagaaaaccactggccctggcattaatattggcggcgctgccggcggcggcaatggcgcaacactgcggcagcctgacgctggatgtctgcccaacgccttacgatcaaacgctacccgcggccaaagacatgctcagctgggatcagacttcacgcgtgattggctttcgcaatcactatcgcaactatgccggcgatgtcttccgccacggcgcctcgacgccgctggagcgcgctgaaaaacaactgaccgatgcccgctatacgctcaacggccacacctggaatttgcaggattacctgaagcgcgagaacgtcagcggtatgctggtgctgaaagatggtaaagtcgcctggaaatatctcgccgaaggtaataccgacaccaccctgtggacctcgcgctcggtaggcaaatcggtggtctcgacgctggtcggtatcgccattcgacagggtaaaatccactcccttgatgacctgattaccgtttatgaacccgaactgaaaggcaccgcctgggacggcgtaacgctgaagcagttgattcaacacaccagcggggtggaatggaatgaagactacaccgacccgcagtcgcatttcgcccgcctgacccagtgtgaagcgcaccccggcgtctatgcctgcgtgcgtaagatcgtcaccggcctggcgcgtcaacacccggcgggcgagcagtggtcctactcttccggcggcgcctggctgcttggggatatcctggagcgcgccaccggcatgtcgctggccgcctggcttgaacaggctctatggcagccggccgggatggcccacgacggcgtgtggcatgcttatcagcaagggaagcacgacgtcggcgcccacggctttaacgccacccttgaagactggggccgctttggtgaattcgtcgcccgtgacggtcggttaagcaatggcaaacagctggtgccgactggctggttcgatcaagccgccagctggaccaaggcgctaaactcggtctcggcagcgcatccggagggtatttacggctatctgtggtggaataacgcgattccggcgaatgcgcaaaacgtacagccgacgccgcaggaagggcttaaagggtcgctgtgggcgctggggatctacggccaggtgatcatggtgaaccgcgcggaacacctggtgatcgtccagtggtcgacctggccgcaggcggaaccttccttcaacgctcagccgttggaagcggcgctgatgtacagcgccattgcccgcgagctgcgttaactccccgctccttgccgctcagccggcgaggagcgtgtcggcattcagcgccaggtgttgcagcaggataatggttttagcatccatgatctcgccatcgcgaatagcctgcagcgcccgcgtcagcggccactccagtacttcaatatcctcaccttccgccgccagtccgccgccgtcgccccgacggtcatcggcctgatattcggcgataaaaaagtagagtttttcggtgacggagccggggctcataaagacggtgaagacgggttcgacacgcgtcacgcgaaagccggtctcctcttccgcttcggcaacgatccgcgcctccggcgaggcgttatccaacagcccggcggccgcctcaatgagatatccgtcgtggccatgagtaaataccggaaaacggaactgacgggtcaggaccaccgtccgcttttcccggttgtagagtaaaatgactgcgccgttgccccggtcataagcctcgcggctctgctcctgccagcgaccgtcccgacgcagcagttcgaaggtatattttttcaacgtgtaccagttatccgagagcagcgtctcgcgaacgtggcggacgtgcggtgcgtgtgtttgcatgttatttcccatttgaggtgacagcaggcaccataacatgcataatcgttcacaaacaagatcattcgatgaaggaaaaccgatgctcgccagtcagagaaaacagcagatcctccagatcctcaccgaggaaaaacaggtgatgtccggggagctaagccagcggtttaacgtctccgaggactccattcgccgcgatctgcgcgagctggcggcggagggaaaactgcagcgggtccatggcggggcattgccggtatccgccgccattgcgccaattgaaacgcgcaaaagcgtgcagatcgcctccaagcaggcggtcgcccgcgccgccgccgccctgatccagccgggacaggtggtgattgtcgatggcggcaccaccaccgcggcgatgatcggctttttacccgccgacctcagctgcacggtggtcacccacagcccgggcatcgccgtggcgctggtggaccacccgcgaatcgaggtgatcctgctcggcggcagagtattcaaacattcggttgtcgccgtcggcgccgagacgctggcgggaatggcgcggatcaacgccgatctgttctttatgggggtgaccggcgtccacccgcgggcgggtttcaccaccggtgattacgaagaggcaggcatcaagcgcgcgctgacggccagggcggcagaaaccgtggtaatggcctcccgggagaagctcaacgccgcgtcggcctttgccatcggcgagctgagcctcgccagtacgctgattgtcgatggagaacccgacgccgcgctgcgccaacagttggtgcagagcggcgtggagatcgtccccgttcagcggtagcgccgccgggacacagggcttaattgccgcctgacgtccggcgctgcagctggtcgcgcagattcggcggggtacccttaatggtcagggtatcagtggcgggatcccagaatacgcgttcgcccagcagcatggcgtcgaagttaatggtcaatccgccgccgctgccggcaaacttggtcagctgacgtaaggtgctgcgatccgccgggaagctctcttccagctcatagccctgctcagcggtgaattcctggaagctcttttcgctgacgccggcgagctctttggacagcgactccagctcaatctcttccccagcctgcagctgttcgttgcagtaggcgtagacctgctggcgcacgttctgtcgctcggatttatcaagctgggcatcggcggcgaagtcatccaccgcctgcagcagaccgcggttctgcgctttggcgttaagcccttcgctggcgccgaggaaatccataaagaaatcggccactttgcgccctacccgccctttcaggaaggtcagatagcgggtcgactccgggttggtttcccattcggtgagatcgatgcgcgcgacgatatcggcatggttaatatccagataatgggtcgagcggatatccagctcttcgttgacgcgcatactgctcaggttattgagtaccgccaccagcagatactcgaccgcaaggtaacgatactggcagaagaggacaatgcctccttcggcgaacgggtatttcgccagctcatcgcgcaggcgaccggtcgccgcgcggctaaacgccagaaactcttcttccccctgacgctgcaggcgcagcgcctgggccagttcgctctcttcattgaacaagccataggctttgcttttggcgctatagacccggtgcagttcagccatcatctcgacgaccgtcgcgttcggctccagcagtgactcgcgcagcaccagctccagattttgttcatcacgtttgattaactgatgcagggcaatctggtcgatatccagactcatgttaaactctccttttagaccgggcggtattcaaccaccgccgggtggccgacgcaactggcgccacacatttcgacgtcgttaacgtcgattgatgcgcttttgcgccgcggcgaaaaaatgcggaaaaaaagctgctgctacggtaatatgttgccctttcacgaacaaacagattttgagtttatgccgcaaatttcccgctatagcgatcaacaggtcgaacagttgctcagcgagctgacgaacgtcctggaatcacacaaagccccggtggacctttcactgatggtgttaggcaatatggtgaccaacctgatcaacagtagcgtcgcgccggcgcagcgtcaggccatcgcccgttctttcgcgcaggctttgcaatcttcgattaacgacgatccagcgcattaaggataacagcaacagtatatggtgactctacgtcagccctaccgagaaaaagtctcccagatggttagctgggggcactggttcgccctgttcaacatgttgttggccatggtgctcggcagccgctacctttttgtcgccgactggccgacgacgcttgccggacgactgttttcgtacgtcagtctcgtcgggcatttcagctttctggtgtttaccagctatgtgctgatcctctttccgttgacctttatcgtggtctcgcagcgcctgatgcgcttcctgtcggtgatccttgccaccgccgggatgacgctgctgctgatagacagcgaggtttttacccgcttccatctgcacttaaacccggtcgtctgggagctggtcatcaaccctgaccagaatgagatggcgcgcgactggcagctgatgtttatcagcgtcccggtcatctttttgattgaaatgctcttcgctacctggagctggcaaaagctgcgcagcctgacgcgccgccgccattacgcccgcccggtcgcctggttcttctttttgtcgttcgtcagcagccacctggtctatatctgggcggacgccaatttctatcgcccgatcactatgcagcgggcgaatctgccgctctcctatccgatgaccgcccgtcgtttccttgagaaacatggcctgctcgacgcccaggattatcagcgtcgtctggtggagcaaggggcgccggaggcggtatcggtccagtatccgcttagcaacctgcgctatcgtgacctcggcgcgggctacaacgtgctgctgatcaccgtcgataacctgaactactcgcggtttgaaaagaccatgccggcgctggcggcatttgccaaagaaaacgttaactttacccagcatatgagctcgggcaataccgccgacagcggcctgtttggcttgttctacggtatttcgcctggctatatggacggtgtcctctcggcgcgtattcccgccgcgctgattaccgccctcaaccagcagggctaccagctgggcctcttctcctccgatgggtttagcagcccgctgtatcgccaggcgctgctctccgatttctcgctgccgagcgcgaagacccagagcgacgagcagacggccaatcagtggatcggctggctggaccgttacgcgcaggatgagaatcgctggttctcgtggatctcgctcaatggcaccaccctcgacgacacgcagcagcagggctttgtccgccgctacagcaaggcggctggcgacgttgatgcccagatcgatcgggtgctgactgcgctgcgcgaagccggcaaactcgataatacggtggtaattattaccggcggccacggcaagccgctgaatgcgaaacacgacgcgttcgactggtcgcgcgagcagctgcaggtgccgctggttattcactggccgggcacgccggcgcaggagattgccaccctgaccgataacaaagatgtgatgactacgctgatgcagcgcctgcttcacgtttcgacgccggccaatgagtactcgcagggagaagatctgttcagcgccgcgcggcgtcgtaactgggtcaccgcggccaacggcgatacgctggccatcaccaccccgaccatcaccgtggtcctcaaccataacggcacctataccacctggagccgcgacggcgagaaaattaaagatcagaaaccgcagctcagtctgttgctgcaggtcctgactgacgaaaaacgctttatcgctaactgattgattaattatgaaccaatcgcgcgtgacccgcttgcattcgcctggggaacgggtaatattgttccccacgcgtcggcacgtagcgcagcctggtagcgcaccgtcatggggtgtcgggggtcggaggttcaaatcctctcgtgccgaccaaaaactccacagaaaccagccttttaaggctggtttttttatgcctgtttcccctgttgccgcccgctcgcttaatttgtgccctttcttcaatgtatcgtgaagatgtacgactatcctgatggtaaattacgtcgtagcatctattattcgaccgtatgactcataagcaggagcggataacatgagagttaatggacttaccaaaggatttttcatccttatcgtcttcattgtaaccctggccttttttgatgttctctcaccctattattccgccatcctttgggctgcgatcctcgcggtgatttttaatccggtcaaaaacaagatccgtacccgcctcggcgagcgcaatggcctcgcggcgctgatgaccatcgtcattatctgtcttatcgtttttacgccgctggctatcattctctcctcgctggcctacgagctcaacctggtgtacagcaaactgcagcataacgacacccagtttccgacggtggtcgccagcctgttcgcccatcttcccggctgggccagaagcttcctcgccgatcataaccttgatagcgcgcagcagatccagcagcagctctctgatgccgctctgaaaggcggtcagtatctggccggcagcgcgtttctgattggcaaagggacttttggcttcaccgtcagcttcggcatcatgctgtatctgctgtttttcctgctgaaggatggaccttatctggtgctgttgatcctcgagtctctaccgttatcaagctatgtgaagcagcatttgttcgctaaattcgccgctgtggcccgcgccacggtaaaaggtaccgtcgccgtggcgctggcgcagggggcgctgggtggctttgccttctggatcgccggtctggacggcagcattctctggggagcgctgatggcgtttctgtcgcttatcccggcggtgggctcggccattatctgggtgccagcggccatctacctcttcgccaccggccagctgtggcagggcgcctttatcgtcggcttctttgtgattgtgattggcctggtggataacattctgcgtccactgctggtgggcaaggataccaggatgccggactatctgatccttatcgccactctgggcggcatggagatctacggtatcaacggcttcgtgatcgggccgctgatcgccgccctgtttatcgcctgctggaacctgctgtcgggacgagaacatgccggcaataccgatgaaatcgatgaagagtttattgaggaagcgaaaaatagccgtaatgaatagctttcccggcagggggctggcggcccgccagcgcctctgttgcgctctgcgcggtcaatgtcttaccagtagataacactattcattttgcaaaaattggtaaataaatcttaacattcagctgagtgatgataggctatctctgtcaggaacgaaaataaaggatgatcaaccgtgaaaaaaatcactacgctagccgtttctctgctgaccgccgcctgcatgtccgctggcgcattggccgcagaccagccgctggaaaaagtcgcgccgttcccgaaagcggaaaaaggcatgaagcgtcaggttattcagctgccgcagcagcaggatgagtcggcgctcaaggttgagctgatgatcggccagacgctggaagtcgactgcaaccatcatcgtctcggcggggaactggaaagtaaaaccctggaaggctggggctatgattactatgtctttgagaagctgagcggcccggtatccaccatgatggcctgcccggacggcaaaaaagagaagaaatttgtcactgccggcctcggggatgacgccatgctgcgctacaacagcaaactgccgatcgtggtatacacgccgagcaatgtcgatgtgaaatatcgcatctggcgcgccgacgagactatcggcaacgccgtcgtccgctaaggcgaacagcgcaaacggcaataaaaaacggcagcccgcaggctgccgtttttgtcagagcgtttatcagagcgcgatatccgccatcggcttgccgccgctcagcggcttcagctccgcctgcggtacctcatccaccgccccagctggctgatatttcagctccagcacttcactggtccacgccagcgctttctcgatctccgccggattgccgtcaagacgaataccgtaggttgggatgatcgccttcagcttggcctgccattccggcgaattgactttatctttaaacactttttccattagctgcagcatgataggcgccgcggtggaggcccctggcgacgcgccgagaagcgccgcgacggtgccttcatcatcgctgaccacttcggtgcccaggcgcagtaccccgcccttcttcgcgtcgcgcttaatgatctgcacgcgctgaccggcctgccacaaccgccagtcctctttccgcgcttccggataatattcgcacagcgcggccagacgatctttatctttctgcatcacctggctaatcagatattttaccagatcgaagttgtccaggccgacgttgagcattggcaaaatatttgaggtattcgtcgaggccagcagatcccacagcgaaccgttcttcaggaaacgggtcgagaaggtggcgaatggtccgaacagcaccacgcgtttaccgtcgataatacgggtatcgatgtgcggcaccgacatcggcggcgcgcccacttcggcctgaccgtagaccttcgccagatggtggttcaccacctccggattttcgcagaccaggaactggccgccgaccgggaagcccgcatactctttggcctgcggaatgccggtctcctgcagcagggtcagcgctgcgccgccggcgccgataaagataaatttagctttaatgacccgcttctgacgacgattgtcggcatccgccagggtgaccgtccagctcttgtcggcgttgcgcttgaagcgacgcaccacggtgcccagctgtagggagaaattatcatgcttttgcagaccggcgatcagctggcgggtaatttcaccatagttgacgtcggttcccacttctgagcgagtggcggcgaccttttgcagcgggtcgcggccttccatcaccagcggcgcccaggctttgatctgctgatggtcttcagaatagcgaataccgcggaacagttcactttgctgcagcgccgcgtagcgcgcacgcaggaagttgacgttatcttcgccccacacaaagctcatgtgcggcacgctgttaatgaaagattttggtttgttcaggacgccgcgcgtcacctgatgcgcccagaactgacgcgagatatggaaggcttcgttgatgtcgaccgctttgtcgatattgatgccgttggcggtctgcggcgtgtagttcagctccatcagcgccgcgtggccggtacccgcattattccacccgtttgagctctcttccgccacgctggacatctgctcaaccatggtaatagaccagtctggctcaagctcctgcagccaggttcccagtgtggcgctcataatgccgccgccaatcaacaatacatccgtctcttgctcatggcgggtgttggtccgagtgctgttgggaccaaccgcctgtgagcgtggtacggccatctttttattcatcggatttgagccttactttactcgctgtttttatttagcgcaggtgatacgattctcacccctcacgttaccaccgaagctcaaaaatttaaatattgtttaaattttaagttctgttttgagatccgttataaaaatgtttaataaatgtatacaccaaatcactttttgtactggtgcgctgacagattccgcgctatcatccctggttttgtgacagaccgcacggaagcagggcctgacaccgctccctctttttttataagctgcgaactttttttatgcctccagtttctgaccccgccgcttccggcaacctccgtcccatcctccgctccccgtctttactgacgcgcgaagtgctggccggcgtgctcaccgccctggcgctcatccctgaagtgatttcgttttcagtcattgccggcgttgacccgcaggtaagcctgattgcttcggtggtgctctgcctggcgatgtcagtcttcggcggacgcccggcgatggtcaccgccgccgcgggctcggtggcgctggtgattggcccgatggtgcatcagcacggcgtggggtacattttaccggctgtcattctggcgggtattattcaaattttgtttggtctgtgcggcatggcgcgcctgatgcgctttattcccccggcggtgatgaccggcttcgtcaacgcccttgggatcctgattttctttgctcaggtgccgcatttctggagtcgacaaccgctaatcgttggcctgttcgtcctgacgctgcttatcgtcctgtgggcgccgcgcgttattaagactatcccggcgccgctgatcgccatcgtcgcgctcaccctctataccgcgaccaccggccagcagctgccgaccgtcggcgatgaagggtcaatgagcggcggcctgccggggttcaccgccctgaccgttcccctgaacctgaccaccctgcagataatctggccgtgcgccctcagcatcgcctttgtcggcctgatggagtccttgctgacggctaagctggtggatgatctcactcataccccgtcgaacaaatcgcgggaaagcgccgggctgggtatcgccaatatccttgccggctgctatggcggcatcgccggctgcgcgatgatcggccagactatcgtgaacgtggaaatgggccgggcccgcagccgcctctcaacggtaatcgccggcctggtgctgctcctgctggtgacagcgctcagccaggtgatggcgaagatcccgatggcggttctcgccggggtgatggtgatcgtggcggtgaaaacctttagctggcatagcattcgcccgggcgagctggcgcgtaatccgtggccggaaacgctggtgatgctggtgaccgtcgccgcgacggtgggaaccagcaatctggcgatcggtgtgctggcggggattgtcgcgatggcgatcatcccccgccgctgcgggcaaaagcgcaggctacattagaaacagcgtcgccagacccagaaaaataaagaagccgccggtgtcggtgatggcggtgatcatcacgctagagccgaccgccgggtcgcgccccagcttcaccatgaccatcgggattatcacgcccatcatcgccgccatcagcaggttgagcatcatggccagcgtcatcaccccgccgagctgcggatcgtcatacagccaccaggtgatggcccccataatcccgccccacaccagaccgttaatcagggcgacccccatttcacgcaggatcaggaaggtaaagctgccgggctggatctgctgcagcgccatcgcccggacgatcatggtgatcgtctggttgccggtgttgccgccgatcccggcgacgatcggcatcagcgaggccagcgccaccagctgtgaaatggtgtgttcgaagccgtcgatgacccgggaagcaataaacgccgtacacagattgaccgccagccacgcccagcgggttttcaccgctttgctgaccggggcgaagacatcctcttcatcgctcaggccgcccatccgccgcagatcgttatcggtttcttcataaaccacatcgacgatctcatcgatggtcaggcgcccgatcagcttgccgtcggcatcaatgacggcggcgctgagcaagtcatcacgttcgaaggtgcgcgccaccttctccgcctcttcgtgcggctgaaaggtgaccgggtcgccctccatcacctcccccacccgcttctgcgcatcattgagcagaatggtctgcagctccagctcgccgagcagcagcttgttacgggtggtaacgaacagcttatcggtgttttccggcattttaccgagacgccgcagatagcgctgcaccgccgccagggtggcctccggtcgcaccgtaatgacctcaaactccatgatcgacccgacgctgttgtcggcgtagcgcataatctggcgaatacgggcgcgcttctcggccggcagggtcgccagcagccgtccggtcaggttgcgcggcagatgctgcagcaggtaaacctgttcatcgatatccagcggctgcatggcctgcagcagctcggggtcgctcatcttgtcgatcaggtcgccccagacgttctctgaggcctccagcagcacttcgccgcgtttatcgtcgggcaccagacaccatagcgcggtgcgggcgtcataggggagcgcttccagcgcatcggcgagatccggcggcggcagatgcgagaccagcatttccacttcggccaggtcatcggccagcgtcccttcatcatatcgttcagccagcgtcagtttgcccagcagcgcggaagtcaccgctttatcggtgctcaagagccaaatcagacgggcgcgctcttcgtcacgcaagcgggcgctttttttatgcaaaacggacatcgatcgggcaatccttttgagaatggtgagccggcctgcgggccggaagccttaagcatagcgcgaggagggggaaataataaccgtcagcgatgtagacgctgaaaatttcagcggcgcccgggcttttcccgggcgcgtggcgattgtcaggccgtacgggccaccgcatcgcgggaagcctgttcccgctcttcgccggtaagttcggcgagctggccggcgcgcatctccagcagacgatcggcgtgctggaagtagtgatcgtcatggctgatggcgaacacggttttgcccatctgctgcatcagcggcagcaggacctggtagaactcgcggcggaaatgcggatcctgatccgccgcccattcatccagcagaatgatgtcccgggactcggccagcgccagcaggagcgccacgcgcttcttctgccctttcgacagccgcaggtcggcgatttttccgttctccagctgcagcttgtgggccatttgcagacgctccagccatgtcgccaccagcgccggatcggcctcctcgccctgcggcccgagcaggcggtcaaacagccagacgtcggtaaacactgcggaaaacagtttgcggtactcctctggcctctccgccgccagcggctggccgtcgacgaggatctgaccggatattggctggtacaggccggtcaggagcatcgccagcgttgacttgccgctgccgttgccgcctatcagaaacaccagctcgccgcgcttcagcgtcagattaagcggccctaccgcaaagcgctggtccggataatggaaggtgacatcgcgcagctccagcgtctgccagtcaggatgcgcctgcggccggggaaagtcggcccggtacggggcgagggagaactgacgcagcttgttaaacgccacctgggcgctgagcagcgtgggcagcgcgccgacggcggagagcagcggcgtgcgcagaaacagcagcgtcagggaataggtcgccgccacggcggtatcggcccagccgaggctgttggccatccagaacaccagcccgatggcgccaagcatcataatattcgaccagttgaccgcgctgaggtggaaggtatcggcgcgaacgatatggtgccggtactcccgggcgtccgggaggtagagctggttaaacacatactccgcgcgctcgcggttgagggtcagctctttacgcccctccagcaccgtctgatagtcgtgatacagtttatcttccgtttcgcgcaggctggccatatgtttgtacacccgcgagaccagcacaaagccgccccagatggtgagcgccatccacagcgccgtcaccagcatcatttttcctgacagccaggcgaggtaggccgcggagccgaacgtgagaatgatcccctgcaccagctccggcaggcgcacaaaggcgatggtgatattgcggatatcgctggtcagcccggcaagcagcgacgcgctgccgatcttctctacttgttcaatctgggtatcgaggatgcgtttaacaaactcaccgcgcagacgatagacaaaatggtggccgagggtggttagcgccagctgcgaacccagggtcaccgccatcagcagccccagcagaccaagaaactccggcaggacccgcagagaggtatcgacagaggtaatcagacgcaggttaatgaaagcgattaagccgatacccagcgcagcgctgagcaggctgagagcaataacgcccagaaacggccagcggtactggcgccagacgagagagagaagttccataacaggctatccgcaaaagcaaaacagccagcagtttaaacggctcgccgatgacatcaagaataattcttattttaatactggcgaccgcccgcctgtcggaaggtgagattgtaacgacagtcgcccgtttccggatgatgccccgctttcagcggctgaatgccatgataaaacaggcgcgactcgccgccccagaccaccacatcgccatgctccagcagcagccgctgcagcgggtcgctgcgttgcaagccgccaaactgaaagatggccggcaagcccagcgagaccgagacaatcggcgcccgcagatcctgttcatctttatcctgatgcaacgacagttttgcgccaggacaatagcggttaatcaaacaggcgtcgggggaaaactcgggatagccgccggcggcggccgccgccagcgccagttcatgaaatacggcaggcatcggcggccaggtttgatcggttaccgggtcgaccggggcgtacaaatagccgtggcgatcggtagtccagcccagcgcgccgcagttggtcatggcgaccgacatggtgtacccgcccggcgtgaccatctggcgaaacggcgactgactggcgacgtcggctatcgcctgcagcagcgccggggcgcgttcgcgggcaaatcgccgcagcaccaccgcgccgggggccagcggctcctgccacggtggggtatcgctaaacagatcgagcattactcctcctcatgttgggcctcgcgcgccagcagctgcgcttttcgcgccgttccccagcgataaccggacagggcgccatcttcacgcaccacccggtggcagggaacaatcaccgccagcgaattcgccgcgcaggcgccggccacggctcttaccgcccgcggctggccaatatgctctgccacctggcggtagctgcgggtctcgcccgccgggatctgccgcagcgcctgccagacctgcagctgaaacgcggtgccctgcagatccagcggcagcgataccggccgccggctgtcgtcgaggtgggcgaaaatctcggccatctgctgacaaaaatcggggtcgccttcacgcagctcggcattgggaaagcgccggcgcaggtcgtcgagcaatgccgcatcgttatcacccggcagcaccgcgcagacgccgcgctcgctctgcgccaccaggcaacgacccagcgcgcagtcgcccgtggtccaggttaccacggtggcggcgccgccgcggcgaaactggctggcggtcatccctaacgctgcgtcggcctggcgataatagctgctgctgtcgggaaaaccagccgccagcgcggcgcgggtcaccggtatcccctgctccagcgcttcccgcaggcgctgcgcccgccacgcttgttgccaggctttaggggtcatgccggtgacggatttaaataaacggtggaaatgaaacgggctcatcgccagctggcctgccagcgcctcgagggtcaggggcgcgtcctgctccagcagccgacaggcctgcgccactttgtcgaccctttgctgctgcgggtagtctttatccggttggcagcgtttgcaggggcggaatcccgccgccacggcggcggcgacgtcggcaaaaaagcgtacgttttcccgccgtgcgcgccgcgagcggcaggagggacgacagcagatgccggtggtcagtaccgcaaagacgaactgaccatcggcccgggtatcacgttcgcagaccgcctgccagcggcgatcatcggtatcggcaactatcggtttcatgacgggtctccagctgtaagtgtaccctcagtctgtggtaaagcccgcagtaaaaaacccgcaatcttgctttttaatttttctcgccgacaaggaaagtgcggaactgcggcgacatccaggttttaaaaccctctccttctttaacgatcatgtagaccgccagcccctcctcgcgcaccacctgctgcgctttttccggccccagcaccatcagtccggtatcccagccgtccgcctccagcgccgttggcgcaatgacggtcacggagaccagcttatgggttatcggctgcccggtctgcggatcgataacgtgcgagatgcgtttgccatcgagttcatagtagttgcgatagctgccggaggtgctgatgccgtgaccattgatgtcgacaatcgcctgaacggcgttttcgcggtcggtcggtttctggatcgctacccgccagggcttgccttcgccgttcatcccgcggctgaccagcgccccgcccaccgacaccagatagcgggagatcccctcctgctccatcaaccgcgcgaggtggtcggcggcatagccttcccccacggtggagaggtcgacaaacagatcgggaatatctttttgcaggaactgcctgccgctctgattaataacctgcagatgctgcaggccggtgcgcgccttcgccgcggctatcgcctcggcatccggggtggtgaccggctgtttatccgggccaaagccccacaggttgaccagcggccctacggtaatatccatcgcgccgtgcgttttggcgccaatccgcagcgacagggtgacgatatccgccatcgcttcgctcaccggccagggttcggtagtggcggcatgattgaagcgcatcagcgctgagtcgtttttccaggtcgacagcaggcgatcgtcggcgtccagctgggcctgaaccttggcgcgcaacgcctgggcctttgcctcatccacgccaatgacgctgacccgccagaaggtgcccatcgttttgccatccagcacggtggccgtcgcggtgggggtcgcaggagtggtagctgaatcgcagccagagagcagaacgcaggcgcccagcagcgcggcgcgaaagaaagtcatatccattaatcgaggctcctcttaccagggcgacaagagtataccagcgaggttaaaccggacataaaaaaaggcgccagaggcgcctttttgttatgcagcttgcaacttagaactggtaaaccaggcccagtgcaaccacgtcgtcggtagagataccggcgttgcgggtgaagctgttgtcgtccagcaggttgattttgtagtcaacataggtggacatgtttttgttgaagtagtaggttgcgccaacgtcaacatatttcaggatgtcctggtcgccgtagccttccagatccttacctttagactgcaggtaagccacggacggacgcagaccgaagtcgaactggtactgagcaaccacttcgaagttctgcgctttgttagcaaagcccagggaaccggcgcgggtcgcgttgtaggtctgggtgtactgagtggccaggtagatgttgttcgcgtcgtatttcagaccgccggtgtaggtttcagcgttgtcgccacgacccagtgccagcttgctgttctggtcgccaagacgtttggagttagagtatgcgaaaccagcgctgatgccatcatagatgtcataggtcagagaagtaccgtaaccgtcgccgttctgtttcaaggcggtacgaccgttgttggtaggagacagagcgccttcgccgctcgggctgccgtttttaccctgatactgcagagcaaagttcaggccgtcaaccagaccgaagaaatcagagttacggtaggttgcaacgccgttagcacgggactgcaggaagttgtcagaaccgtaggtgtcgccgccgaattccggcagaacgtcggtccaggacgttacgtcgtatactacgccgtagttacgaccgtagtcgaaagagcccgcgtcgccaaatttcaggcctgcgaatgccagacgagtccatgcctgatcgctggagctttcagtgttgttcgcctgaacgttgtattcccactggccgtaaccggtcagctggtcgttgatctgggtttcgcctttcacgcctacacgcatgtaggtctggtcgccgtcgacgctcttgtcgtcagagaagtagtgcagaccgtcaattttaccgtacaggtctaatttgttgccgtctttgttataaatttcagccgcatttgctgcgcctgctaccagcagagccggtaccaggagggacagtactttaactttcatgttattaaccctctgtttgttatatgccttttattatgccactgcttactgattacccttctaatcagtcggctatttcattgtgctgcaaaatgcagaataatccaacaagaatatgatactaaaacttctaagatgtttcaaagttcccacaagatgtttcaatttgtaaattcagcggaacttttttcaccgcaaaatggtcagggaaatacgcactaatcatcaaaaaaaatatttaaccttttataatcaaattgatagacaacaacatatctatagcactgaatggtaaaacaaaatgatcattggtggctaaaataagagtcgctatcatcattaactttatttattaccgtcattcagttctgaatgtctgtttacccctatttcaaccggatgcctcgcatccggttttttttacccttctttacacaactttaatttatctgtgctacggctaatgattccctaacgactattaatcaatcaattaggccatcagtggtgcatattctgccaatgtcttgttatttcgtgcgattcttcccttttgtttccgtcaatatcgtcgctggttaaccttcccggcgcggtttcatttacgcttcgtttctaagataattcctggacggcatcgcaccgctggcaccaatctgtagtatggatttacgccattagcctttatactgccagcagcatctgctttgttgccagttactctggcgctacatcctgtttacaaacaatgatgagtcgttcagccacaagatgaccccgaaaaaattctccctgatccccggcaacatcagccgcttcttcattttgatggttattgtcctgctggcgacaatgggggtgatgatccaaagcgccgtcaatgcctggctgaaggagaaaagctatcaggtggttgatgtctcccacgctctgcaccagcgcattgacgcctggcgctatgccacctggcagatctacgacaatatcgccgccacctcagtcaacaccgcaagcggcggtctgcaggagacgcgtttaaaacaggacgtttactacctggagaaaccccggcgtaaaaccgaagccctgatctttggctcccatgacagctccaccctcgaaatgacgcagaaaatgtccgattatctcgatattttgtggggcgcggagaccattccgtggtcgatgtactatctcaacggcctggacaatagtctgatcctggtctccaccctgccgttgaaggacctctcttcgagcttcaaagagtcaacgatcagcagcgtcgtggagtcgcggcgcgcggaaatgctgctgcaggctaatacccttgatgagcgcgagacgttctcgccgctgcgccatctcgcctggcagaacgcgcactattttacgttacgcaccaccttcaaccagcccggacaccttgccacggtggtcgccttcgatctgccgattaacgatctgatcccgcccggcatgaccatcgacagcttccgtatcgagcctgacccgtcgcaaaatctcgccaccacgccggataaagagagcgccgatcatattgggatcacctttaacggcatgcagattgacatcgccaccgacatcagcaccaccggtatgcagttgctgtggacggtaccaatgagcaccatgctgctggagtccatgcagaacattcttctgccgctgctgctcaacattggtctgctggcgctggcgctgtttggttttaccacctttcgccactataaaggacgcagccattcgtctggcgccgggctcccctccgccgccaacagcgaactgcgtctgctgcgcgccattaacgaagagattgtttctctgctgccgctggggctgctcgttcacgatcaggaagccaaccgaacggttatcagcaatccaattgccgaccatctgcttccgcacctgaatctgcagaacatcactaatatggcggaccagcatcagggggtaattcaggccaccgtcaataatgagcagtatgaaatccgccagtatcgcagccaggtagcgccgcgcacccagatcctgatcatccgtgatcaggaccgcgaagtgctggtcaataaaaagctcaagcaggcccagcgcttgtatgagaaaaaccagcagggacgggccgcctttatgcagcacatcggcagcgccctgaagcagcccgcgctgacgctggcggcagaggcggcggcgctcagtagtacagagaatcggacgctggcccagcatgccgatgagctggtcaaactcatcgatgacattcagctcgccaatctgctggaaagcgatgcctggaaaaccaaccagacgttgttctcggtgcaggagcttattgacgacgtcgtgccggaagtgctgccggcgatgaaacgcaagggtctgcagctgctcatcaacaatgcgctcccggccggcgagcagcgctatggcgaccgtgaagctctgcggcgcacgctggtgctgttaatccaatattcagtgaccaccacgcctatcggcaagatcaccctagacgtctgtcaggatgagtcggccagcgatcgcctgaccttccgcattctggataccggcaacggcgtctcggcaaacgagatcgacaatatgcacttcccgtatctcaacgagacccagagcgacctgtacggcaaagcaaacgcccttaccttctggctatgcgaccgcatgacgcgcaagctgggcgggcaattgaccattaaagcccgggagtcgctggggacgcgctataccctgcatctgaaaatgccggccagcgaagaggcgccagaggcgggagagcatttgctggatgacgttatcgtcctgctggatgtgacttccagcgaagtgcggcggattgtcactcgccagctggagagctggggagcgtcctgcatcacaccggacgatcgggcgaccagtcaagcctttgatctttatttaacggataatccgtctaatcttactgcttcaggcttgcttttaagcgatgatgaggtcgggatacgcaagatcggcccgggccaactgcgggtcaactttaatattagcacggcgatgcaggaggctatcctgcagcttattgagcagcagctggcggaggaggcggttcagcccgtcacctcaggaaacgagagtaacgccgaactccatgccagcggctattacgcactgtttgccgatacggtaccggatgatgttcagagattgtatactgaaatcgaagcgggcgattttgctgctctggcgcaaaccgcccaccgcctcaaaggggcatttgctatgcttaatctgatacccggcaagcagttatgtgaaacgcttgagcatctgattcgcgaaaaggatgcgcaaggcatagaaaaatatatcagcgacattgacgcttacgtcaagagcttgctgtagaaggtagccttatacatgaacactatgaacgtaattattgccgatgaccatccgatcgtactgttcggtattcgtaagtcacttgagcaaattgagtgggtgaacgtcgttggcgagtttgaagactccacggcccttatcaacaatcttccgaagctggacgcccatgtgctgatcaccgatctgtccatgcccggtgacaaatacggcgacgggatcacgctgattaaatacatcaagcgccacttcccggatctgtcgatcattgttctgaccatgaacaacaatccggcgatcctcagcgcggtgctggatctggatatcgaagggatcgtcctcaagcagggggcgccgaccgacctgccaaaagcgctggccgcgctgcagaaagggaagaaattcaccccggaaagcgtctctcgcctgctggaaaaaatcagcgccagcggctatggcgataaacgcctgtcgccgaaagagagcgaagtgctgcgcctgttcgccgaaggtttcctggtaaccgagatcgccaaaaagcttaatcgcagcattaaaaccatcagcagccagaagaaatcggcgatgatgaagctgggcgtcgaaaacgacatcgccttgctgaactacctctcttccgtctcgctgagcgcgacggacaaagagtaatctcttcgccctctccgtctcgccccggcgagacggagctccccattattcccgccctttacgcacccgcgccgcatataccgtcagcgtttgcttcagtacgtcgagggtgaccggcttggacagacaactgtccatccccgattccagacagcgctgcttctcttccgccagggcattggccgttacgccaatcaccggcagcgtcaggccaagctgacgaatgcgctgcgtcaggcgataaccatccatattaggcatgttgacgtcgctgagcacgatatcgatgtgctgcttgctgaggacgttgagcgcgtcgatcccgtcgttcgcggtcacgcactggtagccgagcgaacccagctgatccgccagcaggcggcggttgatcgggtgatcgtcgaccacgaggatcatcatgtcgtcgttattgccggcctgcgcctccggggccatcagcgccgggctattttccgcactggcgagcgcaacatggaaaatacgccccagcagcggcagcagttcgtggggagtcgtcacgctgtgcagccattcgccggcggaccgctcctgcggaataccgatatgacggcgacagaagatgaccatggcccttccctgccatccgctcagcgcctcatcgtcagtgagtaagacatcctcggcgtccggcgtttcgccggcatggcggcggaccgtcaggccgtggtagctgagcagcgaggtgacgaacatcgccagcgaagtgttatgaatcgccagccagcaggtcttgccagcgaaaccgtctctgctcaccggtgaggtattctgcacgccatacagaggaatacggatggtaaagcggctacccatccccggctcggtttcgacagcaatatcgccatccatcatgctgatcagtttttcacagatcgccaggccaaggccggtgccctgaaaattgcgctgcacgccggtccccacctggaagaaaggatcgaagaggcgcaatacctctttcgccgggatcccctctccggtgtcgcgaacgctaatctgcagataatcccccgcgcactggacgtgcaggacaatacagccggtatcggtgaactttatcgcattgctgagcagatttgagatcacctgctgcaggcgcatcgggtcgccggacatttgttccggaacgtccggctcgataaagcagtacaggcccagctgcttgcgcaccaccaacggcagatagttagcggagatatggttcatgacttcgcgcggagagaactcccgtggctcgatcttcaactgctcggactcgattttcgagaaatcaagaatatcgctgatgattttcagcagcaggctggaggagttgttcatcgccgtcacaaggcgatcgacgcctttcggcaacgctttggtctgcagcagatcgaggttaccgatgatgccatacagcggggtacgcagctcatggctaactgtcgccaggaacatcgatttcgactggctggcctgctccgccgcctgggccatctcctgcagcgactcctccattttcacgcgggcggaaacgtccaccagcacgcaaatggcgacgttttcattgcgatagcgtgaatgaacaaagctaatctgcaggttggtatggttgctggtcagcacgtcgacaaaattgacctgctggccgcagatgatctgcgtcagccgctggcggtcctcgtgggtcagcatgttcaggtagttgtgcgccagttcattactgagaatattggtcccgtcggcagtgcgcagaatacagatccctaccggggcagaagccacaattttgcggttgaactgctcgtgctcttccaggcgctgggcgtcattctccgcggggataaaaatgcgccgctcatacatccgcgccagcgcgaacagcatcgcgccgctgaggatattaagaacgatagcattgatgatcagcatacggatccgctccagcacctgatctaccgagacggaatagacgatgctcagggaggacggcgagaggctttttttcagcaccagctcgcggaaacccgaactgtagccaaaccacatccgctcctgcatccacttcgcttcgctctggattttaccttccgcaccggccagcgaaatcagcggctgcccgttatcgtcaaagatcgtcacgctcatcggcaggctgcccggcgtaaagaagctttccatgcggatggtctgctccacgcccagcatcgcctgcaggcgattggccatatagaccggcgtcagggcgtaaaaatagcccaccccggggcgaacgccctggcttatccagaacaggttgttgccgcgctcgttttgcggcgcgttgcgatattgctctatgcgctgatgcaggactttcagcgcctgatcgcgctcaatcggcacgtcccgcaggccaaagttggccatgcagaggttatcgctgccgatgagaaagatgcggttaaggtcgtaggcggcagtaaaattatcccgccagtagcgcataaaccatgccagcgactgcagcgaattacgccaggtggcgctcatcgcgctgcagtcggaatcggggtacaggggttcaaagttgggcaccgccatatcgccgttttgcccttgcgctaccgcgtcccctgccgacaagcgattaccggcgacatacttcagctctttcattacatccgcggtacgctggatatagcgctgggcctgatcggcgttgagattaagctcctgatggatttcggcttcccgctcgtgcagcgcgttgacgatataaaacacagagacaaacgcaataagcagccacagcaataccgccagcgctctgaacagataacgtgaaaccttcagggttgtatgaaaagaggcaagatatttcaatgtggcgatgctcggccgtcagggactcaacagaatgcggttaaggtagcggtaaaccggctttgccgcaatgttaatgcaaaaagggccgggaaaatacccggcccttccagaacatttacctcggacgattattcttcgtcttcggcgatgtcgtcatcggtatccgcttccggggcgatatcatcatcgccttctgccgcgctaccgtcgatggcatccagctcttcatcatccaccggctcagccacgcgctgcagacctaccacgttttcatcttccgcggtgcggatgaggatcacgccctgggtgttacggcccacgatgctcacttcggaaacgcgggtacgcaccagcgtcccggcgtcggtgatcatcatgatctgatcgcagtcatccacctgcacggcgccgaccacggaaccgttacgctcggtgactttgatcgaaataacgccctgggtggcacgcgacttggtcggatactccgccgccgcggtacgtttaccgtaaccgttttgcgtcaccgtcaggatcgcgccttcgccgcgtggaataatcagcgagacgacgctgtcgttttccgcaagcttaataccgcgtacgccggtggcggtacggcccatggcgcgaacggcgtcttctttgaagcgtacaaccttaccggccgcggagaacagcatcacttcatcctgaccagaggtcagatcgacgccgatcagctcatcgccttcgttcaggttgaccgcgatgataccggcggaacgcggacggctgaactcggtcagcgcggttttcttcacggtaccgctggcggtcgccataaagacgttgacgccctcttcgtactcgcggaccggcaggatggcggtaatgcgctcatcggcttccagcggcagcaggttgacgatcggccgaccgcgcgcgccgcggctggcttccggcagctgatagaccttcatccagtacagacggccgcggcttgagaagcagaggatggtgtcatgggtgttagccaccagcaggcggtcgataaagtcttcttctttaatgcgcgctgccgatttgcctttaccgccacgacgctgtgcttcgtagtcggtcagcggctgatacttcacatacccctgatgcgacagggtgaccaccacatcttcctggttgatcagatcttcgatgttaatatcagcgctgttggcggtgatttcggtacgacgttcgtcgccgaactggtcgcggatcagctccagctcttcgcgaatcacttccatcagacggtcggcgctgccgagaatgtgcagcagctctgcgatctgctccagcagctctttatattcgtcgagcagtttttcatgctcaaggccggtcagtttctgcagacgcagatccagaatcgcctgagcctgctgctcggtcaggtagtatttaccgtcgcgcacgccgaactctggttccagccattccggacgcgcggcgtcatccccggcgcgctccagcatcgccgcaacgttaccgagatcccacgcctgggcaaccagcgccgttttcgcttctgccggggtcggcgcgcgacggatcagttcgataatcgggtcgatgttggccagcgcaacggccagcgcttcgaggatatgcgcccggtcgcgcgctttgcgcagttcgaaaatcgtacgacgggtcaccacttcacggcggtggcgtacaaacgcggcgatgatgtccttcaggttcatgatcttcggctgaccatggtgcagagctaccatgttgatgccgaaggagacctgcagctgggtctgggaatagaggttgttaagcaccacttcccctaccgcatcgcgcttcacttcaatcacgatgcgcatcccgtctttatcagactcgtcacgcagcgcgctgatgccttccacgcgtttttctttgaccagctcggcgattttctcgatcaggcgcgctttgttcacctgatacggaatttcgtgcacgatgatggtttcgcggccggatttcgcgtccacttccacttccgcgcgcgcgcgaatgtacactttaccgcgaccggtgcgataggcctcttcgatgccgcgacggccattgataatggcggcggtcgggaaatcagggccaggaatatgcgccatcagcccttcaatgctgatgtcttcatcgtcaacatacgccagacagccgttaatcacttccgtcaggttatgtggcggtatgttggtggccatccctacggcgatcccggaggcgccgttcaccagcaggttaggaattttggtcggcatgacgtccggaatacgctccgtaccgtcatagttgtcgacgaaatcgaccgtctctttttcaagatcggccatcagctcatgagcgattttcgccagacgaatttcggtataacgcatcgccgcggcggagtcgccgtcgatggaaccaaagttaccctggccgtccaccagcatgtaacgcagcgagaacggctgcgccatacgcacgatggtgtcgtataccgcgtagtcgccgtgcgggtggtatttaccgattacgtcaccaacgacacgggctgattttttataggctttgttccagtcattgcccaatacgttcatggcgtaaagtacgcgacggtgtaccggcttcaggccatctcggacatccggcagcgcacggccaacaatgaccgacatcgcataatccagataagagttcttaagctcttcctcaatgttgaccggtgtaatttctctcgcaaggtcgctcatctaaccgctatccctctactgtatcccggattcaaaggtcgcaaattataacacagccgcgctaatagaggtaaagcaatacggtttattcatggcgcgctgctgatatactcgcaggtctgaacagaaaaggagtaaaagcgcccatgaatgccgaaaaaacgtcggtagcccctaacgtcgatcatgctgaaatcgccaaattcgaagccgtcgcctcgcgctggtgggatctggagggcgagttcaaaccgctccaccgcatcaacccgctgcggctgggctatattgccgaacgctccggcggcctgttcggtaaaaaagtcctcgatgtcggctgcggcggcggcatcctcgccgagagcatggcgcgcgaaggcgcgacggtcaccgggctggacatgggggccgaaccgctgcaggtcgccaggctgcacgccctggagagcggtattcaggtagactatgttcaggaaacagttgaggaacatgccgcgaagcacccgcagcagtatgacgtcgtgacctgcatggagatgctggagcacgtccccgacccgcagtcggtggtgcacgcctgcgcgcggttagtgaagcccggcggccaggtcttcttctccaccatcaaccgcaacggcaaggcctggctgatggcggtagtcggggcggaatatgtcatgaagatggtgcccaaaggcactcatgatgtgaagaagtttatcaagccggccgagctgctgggctgggtagatcagactactctgaaagagcagcatatcatcggtctgcattacaatccgctgaccaataccttcaagttagcgccgggggttgatgttaactatatgttgcatacaaccgccaaacaggactgaggtcagcacctccgcttatgatgattgcgcggcatcaagccgcgtgattatttcttccgatgaagaaatcagcactcgatcaaattttcatttttttttctgttttattgacttcttctccaggccttatgcgacgtggacttgcggattattacccttccgcaacctcaatttaacgtcaaaatcaacccttgtactcaaaagattccttactaaaatactcaccatatagcgtttcttttatcgacaaccccctacatatagtatttatccacagagttagtcacaacggccttctgtggataaacgggggatattttctttcacggacaggtaaaatccacatgaatcagagtctgctggtgacaaagcgcgacgggaccaccgagcgcatcaatctcgacaaaatccatcgcgtactggattgggcggcagaaggactgaataacgtttcgatttcccaggtagagctgcgctcccatatccagttctatgacggcatcaaaaccgcggacatccacgaaaccattattaaagccgctgcggatctgatctcccgcgacgcaccggattaccagtacctcgccgcgcgtctggcgattttccatttgcgtaaaaaagccttcggtcagtttgagccgccggcgctctacgatcacgtggtgaagatggttgagaaaggtaaatacgatcatcatctgctggaagactacacggaagaagagttccagcagatggacggtttcctcgaccactggcgcgacatgaacttctcctacgcagccgttaaacagctggaaggcaagtatctggtacaaaaccgcgtcaccggcgaaatttatgagagcgcgcagttcctctatattctggtcgccgcttgcctgttctcgaactatccgcgcgaaacgcgtctggactatatcaagcgtttctacgacgcggtgtccacctttaaaatctcgctgccgacgccgatcatgtccggcgtgcgtaccccaacccgtcagttcagctcctgcgtgctgatcgagtgcggcgacagcctggattccatcaacgccacctccagcgcgattgtgaaatacgtttcccagcgcgccggcatcggcatcaacgccgggcgcattcgcgcgctgggcagcccgatccgcggcggcgaagccttccacaccggctgcattccgttctacaagcatttccagaccgcggtgaaatcctgctcgcagggcggcgtgcgcggcggcgcggcaaccctcttctacccaatgtggcatctggaagtggaaagcctgctggtgctgaaaaacaaccgtggtaccgacgccaaccgcgttcgtcacatggactacggggtacagatcaacaagctgatgtacacccgtctgctgaagggcggcgatattaccctgttcagcccttccgacgtcccgggcctgtatgacgccttcttcgccgatcaggacgagtttgagcgcctgtacacccagtacgagcaggacgacagcattcgtaagcagcgtattaaagccgttgagctgttctcgctgatgatgcaggagcgcgcctctaccggccgcatctatatccagaacgtcgaccactgcaacacccacagcccgttcgatccggtagtcgccccggtgcgtcagtctaacctgtgcctggagattgctctgccgaccaaaccgctggaagatgtcaacgacgaaaacggcgaaatcgcgctgtgcaccctgtcggccttcaacctcggggctatcgacagcctcgacgagctggaagagctggcagtgctggcggtgcgtgctctggatgcgctgctcgactatcaggattaccccatcccggcggctaaacgcggcgcgatggggcgtcgtacgctgggtatcggcgtgatcaacttcgcttactatctggcgaagcatggcaaacgctactccgacggcagcgccaacaacctgacgcacaaaacgttcgaagcgattcagtactatctgctgaaggcctctaacgagctggctatcgagcaaggcgcctgcccgtggttcaacgaaaccacctatgcgcagggcatcctgccgatcgatacctataagaaagatctggacggcatcgtcagcgaacccctgcactacgactgggaagcattgcgcgaatccattaaaacccacggcctgcgcaactccacgctctccgcgctgatgccgtccgagacctcgtcgcagatctccaacgccaccaacggcattgagccgccgcgcggccacgtgagtatcaaagcgtccaaggacggtatcctgcgccaggtggtgccggattacgaaaacctgcagaacgcctacgagctgctgtgggagatgccgaacaacgacggttatctgcagctggtgggtatcatgcagaagtttatcgaccagtcgatctctgccaacactaactacgatccgacgcgcttcccgtccggaaaagtgccgatgcagcagttgctcaaagacctgctcaacgcatataaattcggcgtcaaaacgctgtactatcacaacacccgtgatggcgctgaagacgcccaggatgacctggccccgtccatccaggacgacggctgcgaaagcggcgcttgtaagatctaaggtatttttgccgggtaacgctacgcttacccggcctacgtttgtgtaggcccggccaacccattcctgccgggcaatacagttcaacaggactcacttcaatggcatacaccactttttcacagacgaaaaacgatcagctgctggaacctatgttttttggccagccggttaacgtggcccgctacgatcagcaaaaatacgacatctttgaaaagctgattgaaaagcagctctccttcttctggcgcccggaagaggttgacgtttcccgcgatcgcatcgactaccaggcgctgccggaacatgaaaaacatattttcatcagcaacctgaagtaccagacgctgctcgactccatccagggccgtagcccgaatgtggcgttgctgccgctgatctccatcccggagctggagacctgggtagaaacctgggccttctccgagaccattcactcgcgttcgtacactcacatcatccgcaacatcgtcaacgacccggcgaccgtgttcgacgacatcgtcaccaacgagcagatccagaaacgtgcggaaggcatctctcactattacgattcgctgatcgagatgaccagctactggcatctgctgggcgaaggcacccacaccgtcaacggcaaaaccgtgaccgtgaatctgcgcgagctgaaaaagaaactctatctgtgcctgatgagcgttaatgccctggaagcgatccgcttctacgtcagcttcgcctgctccttcgcctttgccgaacgcaaactgatggaaggcaacgccaaaattatccgcctgatcgcccgcgatgaagcgctgcacctgaccggcacccagcatatgctgaacctgctgcgctccggcagcgacgatccggaaatggcggaaatcgccgaagagtgcaagcaggagtgctatgacctgttcgtgctggcggcgcagcaggagaaagagtgggcggactacctgttccgcgacggctcgatgatcggcctgaataaagatattctctgccagtacgtcgagtacatcaccaatatccgcatgcaggcggtgggcctcgatctgccgttccagacccgttccaacccgatcccatggatcaacacctggctggtctccgacaacgttcaggtggcgccgcaggaagtggaagtcagttcttatctcgtcggccagatcgattctgaagtcgatgccgacgatctgagtaacttccagctgtaatgaagcggatcttcctgaaaatctctgacactcgccttgagtgtcaggatgaacacccttccctgctggcggcgctggagtcgcataatatcaacgtcgaatatcagtgccgcgaaggctactgcggctcctgccgcacgcgtctggtctccggccaggttgactggctgaccgagccgctggcctttatccagccgggagaaattttgccctgctgctgccgggcgaaaggcgatattgagatcgagatgtagtcttgtcaggtggcgctacgcttacccgacctactgttccaggaccggccgtttacgcactgccgccctgggctgctgaaactgccggtgttgacggcctcaaaatcgctgagacgttcccggaaggccggggcagcccgcatggatgcgggctgagggccgtgttttgcatggacgctacctcggcccgacccgaagcctgcagggataagtcgaagggaccgcgcagcggcgattttgctggccggagcccgggggtacagggggaggcggcgactggcctccccctgtgcgctccctgcgctatgaaaggcataacgcagaagaaatatcgggagcgcaatcttccaggaaataacatagaacaaacgttattcccgggtcgaaatcgttgcacgccgagaacagtgtcaacaaaaccgcagttcgtacgccgggtaaggcgtagccgccacccggctttttagcgtttcgcgtccaggaactgcaccgctttatccgggaaatcggtaaataagccgtcgacgcccgcctggttatacagcacgtcatagagctgattaacgttagtcgcgtactccggcaactgatccgcgcgcacggtgtacggatgcacctgcagatggctggcatgcgcctctttcaccatcgccgtcagcttcaccgcccccggcttcgagccttccgctaccagcatatggtaatccgggccgataccgtccgcgtactgcgcaatctgcgccatcgcccctggcttgaacatccagtcatagctgtagttcacccacttaccatcggcctgtttctgctgggtttcattccagtcggtataggcgatgagctgcaccagattgagatccatccccatcttcggctccagctcatttttaatgcgtttgagctcgttggcgtcaaagcactgcagataaaccttatcctgcttgctggtatagccatattccttcagcaccttcaatgtgctggcggcaatatctttgccttcctggtggtggaaccacggcgctttgatttccgggtagataccgatgtttttgccggttgaatggttcagcccctggacaaactcaatctcctcttcaaaggtatgaatacggaaatcggatttgcccatcgggaatcgcccgggataggtttgcacgttcttaccatttttcggctcaaaaccttcggtgaacttcagcgacttaatctcgtccagggtaaagtcgatggcgtagaaacggccatctttacgcgcccgctgcgggaaacgctgcgcaacgtcagtcacccgatcgagatagtggtcgtgtaacaccaccagccggtcgtctttggtcatcaccaggtcttgctcaaggtaatccgccccctgagcgtaagccatcgctttcgccggcagggtatgttccggcagatacccgctggcgccgcggtgggcgatgaccattttatcagccgctgtcgcgctgaagcacagcgccgaactggacagaatcattccgctcatcagcgcggtaagtttcattttcatcgccgctccttaggcttgtttcagctgttggtgatggcgacgttcaccgagcatcacgataaccagcaggataaccgccagcacgctgccgccgatcatcaccataaagccgccgtcccagccgaagaaatcgacggtgtagccgacgatagcgctcgcggccacggaaccgccaagatagccgaacaggccggtgaagcccgcggcggtcccggcggcttttttcggcgccagctcgagggcatgcagaccaatcagcatcaccgggccgtagatcaggaagccaatgatgatcatacaggccatatcgacgcccggattacccggcgggttcagccagtaaacgacagtggcgatggtcaccagggtcataaagaacacgccggtggcgccgcggttgcctttaaacactttgtccgacatccagccgcacagcagcgtgcccgggatccccgcgtactcgtacaggaaataggcccaggaggatttatccagcgcgaagtgtttaacttctttcaggtaggtcggcgaccagtcgagaatgccgtagcgcagcagataaacgaagacgttagcgatagcgatgtaccacagcagcttgttcggcagaatgtactgcataaagatctgcttcgccgtcagctcttcttcgtgcttttcgctgtaatcgtccgggtagtcgtttttatattcttcaatcggcggcagaccgcaggactgcggggtgtcgcgcatcatcgcaaaggcgaaaatcgccagcagaatggcgccgaatgccggcatatacagcgccgcgtgccagtcgttaaaccacgccatccctaacaggaacagcagcggcggaatgccgccgccgacgttatgcgcgcagttccacaccgagacaatcccgccgcgctctttctgcgaccaccagtgcaccatggtccggccgcacggcggccagcccatcccctggaaccagccgcagaggaacagcagcacgaacattatcatgatgctggacgtcgcccacggcacgaagcccatcaccagcatcaccagcgcggcgaggatcaagccagccggcaggaaaatgcgcggattcgagcggtcagagaccgatcccatgatgaatttcgaaaatccataggcgatggagataccggaaagggcgaagccgaggtcgccacgagagaacccctgctcgataagataaggcatcgccagggcaaagttcttacgaaccaaatagtaggcggcataaccaaaaaagatgccaataaaaatctgccagcgtaatcggcgatatagcggatcaatctccgctgctggcaaacgcgctttatgcgcggcgggtttaaaaatacttaacatatcagcctccgtggcccttgctgttttctactgaagtcacgacaaaatcccagattaatcaccaacttcaaatatggtcgcgatggtaggcaatacgtagagttgatactgtgaaacatcgcacaatttgttacagaaatatgacaaaacgttccaatgtgagcacgaaatcacataacacgctcaaataacgcgcgaatatgctcgaaatcaaacaataaccttactaattgtggctaaatggcgttaaacgaaagcagaggagctgaagatgacgggacgtcttgatagcgaggtcattatcatcggcggcggagcaaccggcgccggtatcgcccgcgactgcgcccggcgcggattacgaacgctgctcattgagcgccatgatatcgccaccggggcgaccggccggaatcagggactgctgcacagcggcgcccgctacgcggtgaccgacaacgaatccgcccgcgaatgcatcagtgagaaccgcatcctgcgccgcatcgcccgccactgtattgaaccgaccaatgggctgtttatcaccctgcctgaagatgacctggcatggcagcaaacctttatcgacgcctgtcagcaggctggcatagaggccacgccgctctcgccgcaggaagcgctgcgccgggagcccgccgtcaacccgacgctgctgggcgcggtgcaggtcccggacggtaccatcgacccgtttcgcctcaccgcggccaatatgctcgacgcccgcgaacacggcgcgcagatccttaccggctgcgaagtaacaggcctgctgcgccggggcgatcgcgtctgcggcgtccaggtatacgaccgccaacttcaccaggcccgcactctgtacgccgggatggtggttaacgccgccgggatctggggacagcgtattgcggaatatgccgacctgcgcatcaccatgttcccggcgaagggatcgctgctgatcctcgatcatcggattaacaacctggtgatcaaccgctgccgtaagccggccgacgccgatattctggtgcccggcgataccatctcgctgatcggcactacctcaatgcatattccttatgacgaaattgacgacaaccgggtaacagcggcggaggtcgataccctgctgcgcgaaggggaaaagctggcgccggtcatgggccgcacccggatcctccgcgcctactccggcgtccgcccgctggtggccagcgataacgatcccagcgggcgcggcgtcagccgcggcatcgtcctgctcgaccatgcccagcgtgacggtatggaaggcttcattactatcaccggcggcaagctgatgacctatcgcctgatggccgagtgggccaccgacgccgtctgtcgtaagctgggaaacaccaccccctgtaccacggccgaagccccgctgcccggttcacaggagccaacggaaagtaccctgcaaaagattatctccctccccaccccgctgcgcggctcggccgtctaccgtcacggcgatcgcaccccgtcctggcttggcgacagccgccagcaccgtagcctggtctgcgaatgtgaagccgtcactgccggtgaagtgaaatacgcggtggaaaacctggcggtcaacaccctgctcgacctgcgccgccgcacccggattggcatggggacctgtcagggggaactctgcgcctgccgcgctgccggactgctgcagcgctttaacgtcaccacgcccgcgcagtcgttaacccagctctcggaatttctcaatgaacgctggaagggcgtgcagcccatcgcctggggcgatgcgctgcgcgaaagcgaattcacccgctgggtctacctcggcctgtgcggattgccacaggagcaccgggatgaagtttgattgcgcgattatcggcggcgggctcgccggcctgctgtgcgggctggccctgaatcagcacggcctgcgcagcgtcatcatcagccgcgggcagagcgcgctgcatttttcctccgcgtcgttagacctgctctcggcgctgcccaacggcgatcacgtcactgacgtcgcacaaggtctgcagcagctcgctgaacagcttcctgaacacccttattcccggctcggcgccgaggcggtactcaaatacgcgacacagaccgaagccctgctggccgcctgcggcgcggtgatgcagggcgatgcgcgccggccgcaccggcgggtaacgccgctggggacgttgcgcccggcatggctgtcgccccttgaggtgcctgtcgcgcccctgccgtcgcagggcgcctgtctggtggggatcagcggctttgctgattttcagccgcatctcgccgccgccgcgctcggtcaacacggagttaccgccgcggcggtggaaatcgagttaccgctgctggatgtgctgcgtgacaacccgaccgagtttcgcgccgccaatatcgcccgcgtcctggatgatgagaatatgtggccggccctgcatgcagcgctgctaccgctggcgcagcagtatgacctgctgatcatgcccgcctgttttggcctcgccgacgatcgcctgtaccactggctgcaggcgcgtctaccctgcccgctgcgtctgctgccgacgctgccgccttcggttcccgggatgcgtttgcattctcagctgcaacgccagttcattcgcgagggcggcgcctggctcgcaggcgatgaggtggtgaaaatcagccatcgacaggacgccgtcgaggcggtctggacgcgaaatcacggcgatattgcgctgcgtccgcgctttaccgtgctggccagcggcagctttttcagcaacggtcttgtcgccactcgcgatagcgtgcgcgagccgatcctcggcctcgaccttcaccagaccctgccacgggaaagctggtaccagcgcgatttcttcgcctcacaaccgtggcagcgcttcggcgtgaaaaccgatgccctgctgcgccccctgctgggcgggcagccgttccataatctgttcgccatcggctcattgctcggcgggttcgatgccattcagctcggctgtggcggcggcgtctgcgccgttaccgcgctgcacgccgccagacagatccacgcccttgccggaggccggccatgaacgatacccgttttgaaagctgcattaagtgcacggtctgtaccaccacctgcccggtaagtcgggtcaatccgcgctatcccggcccgaaacaagcggggccggacggcgaacgcctgcgtctgaaggatggcgcgctgtacgacgaggcgctgaagtactgcattaactgcaagcgctgcgaggtcgcctgcccgtcggatgtgaaaattggcgatatcattcaacgcgcccgggcacagtacggccagcaaaagccgaccctgcgcgacgccatcctcagccataccgacctgatgggtaccctttccaccccctttgcccccctggtcaacgccgccaccggcttaaaaccggtgcgccgtctgctcgacgcgacgctcaacatcgatcaccggcgtacgctgccgaaatatggtttcggcaccttccgccgcgcttaccgccagctcgccgcccgtcagaagcagtacagcgaacaggtggctttctttcatggctgctacgtcaactataaccatccacagttgggtaaagatctgattcgcgtcgtcaacgcgctgggtaccggggtgcagttgttatcaaaagaaaaatgctgcggcgtaccgctgatcgccaacggttttttcgacaaggcgcgtaagcaggcgcagagcaacgtcgccgcgatgcgggaaaacacgctaccgatcattgccacctcctcgacctgcgcctttacgctacgtgatgaatacccccatctcctcgatgtcgataacagcgatcttcgcgatcgcgtcgagcttgccacccgctggatctggaaacagctggctgccggcaggacgctaccgctgcgcccgctgccgctgaaagtggtctatcacaccccgtgtcatatggaaaagatgggctggtcgctgtataccctcgagctgctgcggctgatccccggcctgcagctggaggtgctggattcccagtgctgcggcatcgcaggcacctacgggtttaaaactgagaattacgcggtatcccaggctatcggcgccccgctgttccgtcagattgaggagagcggggccgacctcgtcgtcaccgactgcgagacctgcaaatggcagattgagatgtccaccagcaaacgctgcgagcatccgctgacggtgctggcgcaggcgctcgtctgagcccagcgccagcctgtgccgtcaatagctcgttttctcttgcggctgggcgctgtcagatttaaacatcgccagccggcggtccagcgcctgggtatacagcatggtatccaccccgacggcgacaaagttggccccccaggcaagacatttttccgccatcgccgggtcgaccgccagaaatccggccgctttccccgccgcgcgaatgcgccggatgctctgctcgatcacccgctgcacgtcagggtgaccggcatcgtccgggtagcccagcgaggcggagagatccgccggaccgatgaacaccccgtcaatgccgtccacctcgagaatagcgtccaggttctccagcgcggttcggctctcgacctgaatcagcagacagagttcgtcattcgcctccgccatataattctccacccttccccagcgcgccgctctcgccacgccggcgccaacgccgcggctcccgatggggggataacgggtcgctgagaccacttcccgagcctgctcggcggtatcgaccatcggcaccagcaaggttctggcgccaatatccagcacctgttttatcaggctgcggttgccctcgaccgggcgaatgaccggctggctggcatagggggcaatcgcctgcagctgatgataaagatcctgaatggtgttcggggcatgctcgccgtcgatcagcagccagtcgtatcccgacgtcgcagcgatctccgccatgtaggatgaggtggagctcagccacaggccgatttgcgtctcaccgcgtaataatccccgtttgaaggggttagataacagtgcgttcatagcgattcctttattcaatgctgtacgctgccgcgctggggtaccgcgcgggtaaggctcaatgaaaagataatgaccaccccgacaatggcgacgccggccagggttaacagtccggcggcgctgctggcgaacaacgtttcggcctgcacgcgcacgatcggcgccagaaaaccaccgatggcgccaaacaggttaacaaagccaatccctgcggccagcgccgtgccggacagcagctgcgtcggcatcgtccagaagaccggctgcacggcgatcaccccgaccgccgccacgcacagcgcgatgatagccagcaccggcgccaccagtccggacactgcaatcccgaccgccgccgccagcagcgtcagggcggcaatattgcgtcgctcgccggtgcgatcggagtagcgagggataagccaggtgccaaacagcgccgccacccacgggatggccgtcaccaccgaggcaacgaagccgactttggtgcccagcagcgcagcaacctgggtgggcaggaagaaaatcagaccatagaccgccacctgaatggtcagataaatcagcgccagctgccagacccgcccgttacgcagcgcatcggacaggcgcgaggcaatctttttctcctcctcgcgcgccagctcgcttatcagcgcctgtttctccgctgcgctcaggaagcgggcatgctgcggcgaatcgtccagccagaagaaggtgaacgctcccgcggcgacggcgagcaggccttcaatgacaaacatccagaaccagccgggatggcccataaatccatgcatctccagcagcgcaccggataaaggcgatcccagcgtcagggccagcggcgcgcccatataaaacagccccataatgctggcgcggttttgctggggaaaccactgtgaagtgaggtagatcattccgggaaagaagcccgcctccgccgcgcccagcagggtacgtaccagcaggaatttcgcttccgtatccgcccacgccatcgccgccgacagcacgccccacagcagcgtggtgcagccgatccatcgcctggcgccaaatttgcgcatcagcagattggccggcaccccgaggaaggcatagaccacaaagaagataccggcccccagcgcgtaggcctcattgctgagtccggtatccagctggtaggtctctttggcgaaaccgatattagaacggtcaagaaacgccagcacgtacagcgccagcataaaggggattaagcgggcgcggtttttcttcaccacgctctccagcagagtgttgctcatcataatatcctcaggcgcgggccgccgggcggcccgacgcaatcagtgttgataaggacgcttcaggttgcagtcgcgattgagctcgacgccaaagccgggtttatccaggaccgatttatgaatgcgccctctctccggcaccggctcgccgagcaggatcgggtcgaactgcgggcgcagcgtggcgcagtccggactggtcatcagaaactcactgaacggcgtgttggtgaaggtgatcaccgcatgatgtgagtaaaccgacgagccgtggggcactaccagctgcccgcgcgctttggcgatggccgcgatctctaccagggtggttaagccgccgcaccagccgacgtcgggctgcataatatcgatgccggtttccgacagggtgcggaaggactgcagcgtgccgtggtgctcgccgctggtcaccatcatcccggcaggcgcctggcgcttcagctcgcgatagccttcatactgctgcggcggcaggcactcttcgatccacttgaggttataaggggcgcaggcatgggcaagtttggtggcatagttaacgtcctggctcatccagcagtccagcattaaccagaaatccgggccgcatttttcgcgcatatccgccaccatggcgacgtctttgcggatcccggcgtcgccatcgtgcggcccccagtgggtaggcattttgccgccgataaagcccatctcctgcgccaggtccggacgtgcgccggtggcatagaactggatttcgtcgcgcaccgccccacccaacagtttgtagaccggcaggccaaccactttcccgaagaggtcccacagcgccaggtcgacacaggagatggtattcatcaccaggccgccggatcccgcgtagtaaagggtggcgttaagcatctggtcatggatcagtttgatatcgctgacgcatttgccttcgataaagcggttgagatgtttttcgacgataaagcagcccatctccccggccgtcgacaccgcaaagccggtctgtccgttgtcggcttccacttccacaatcagcgtccccagcacattgataccaaacgactgccgggactgctcatactgtttatatttgctcatcggggtggcgatatgatcgtcaatccagtggttagccccctggtcatggtaatcgccgccgccggcgccctgctctgctgtggcgccgccgatgaaccaggcgcggacgtgtttaattttcggtagggtcatgatgttctccttatgatgaggcgagttgttcgaaggggcttttccaccccagcagacgtgaaatatctttcgcgcaggcaatcgccttaccagccaggtaatcgcgattgtcttcattgatttgcagacgggtacccaccaccgagatggcggcggtcaggtcgttattggcgttaaataccggggcagccacgcagcgcacatccggatagtcctcgccattatcaaagctccagccccgggcgcggatccgccccagctcctcccgcagctgttgagcatcggtgatggtcgttggcgtggcccgctcccactgcaggtcttcgataatcgacgcctgaacgctggcgggctgccaggccagcaaacatttgccgatcccggagcggtaaagcgacaggctcttaccctcatgcgagcgcacgctgatggtggcgggagactcaattttcagaatgtagtaggcgttaccctgatcgataatgcccagatgacaaagcaggccgcactcatccatcagccgggtgaggcgcggccgcgccagctcgcgcaggtccattttgctcagcgcctgcccggccagctccaccagcttggtccacaggcagtagttatcctgattatccatactgatgaagcgctgctttttcagctcgcccagcagcagatacaccgtgcttttcgggatccccagctccgctattatcgtcgccgcgctgcaggggccgatgcggccaattaaattgaggatctcaatcgcgcgggtcagcgccgggactttcgttgattccaacatactggactccaatcctgaatactggaatcagtgttgcgattgtccgggcggtaaagtgtgagcgacatcgcggggcaatcgttttcccgtatactggaccgttcgcagcagaaaattgcgacttaacgcacagaattttttcagaggagtacaacaggttggacgaccgacgccccgaggatacggtgcgccggggggaatgatttacagcgagagggaatccaccacgttaatccagccatgttcgctggccagtggttgaccattcagccagcgacgcagcatgtttaacgccatcatagcgcagacttcctggcgtaccgccaggctgtggcgggtggcgctaaacttcacccgcagcgcgaaggtgccgtccggggtggccagggccacgttaagatgatcgttttcctgaccgctcaccgccagggccaggccggcaaaatggtttatgcgccgctcggccgcccagcgggccgcctgcgccagcgtctcctcctgcgccggaacgacttcgctggccagcagcggcgcgccggcgcgggacagctggagcgccagcaggccgctggtaaactgctcgctgagcgtcaggctcagctgccgctcctgcagacagcgggcgatttgcgcgggtaacccttccgtaccttcgaaaatcaggctgtcgccagccaccttacgcacctccggccacagggccagcatggcgtcgcgctggttggccggtccggttagcttgagttcaatgatcggcatcgacgagcggtaacccatcaccacgcccggaggcagcgtcagcggattaagactttgcgccagctcgctctccgagcggccaaaggtggtcaaacgcaggcataccggcgggtccggcagcgtaaagcgctggcgcaggcgcggtaaaatttcctgctcgaccatcaccttaaattcagaggggaccccgggagtgaaaaacatcaggcagcggttgagctggatggcaaagccacaggccgtaccgaccgggttgttgatcatctcggcgctggccgggatttccgcctgcttacggttgctttccgccatcggcctgccgcgctcggcaaaaaagcgggtcatggtttccagccactccggatgcaaaataagcccctcgcctttcgcagtggcggcggccagcgcgctcaggtcgtcgctggttgggccgaggccgccgttgacgatcagcacatccgcctgttcgctgcgttcgcgcagaatcgccaccagcgcatcgagatcgtcgccaacggtattgcggcgcgttaacggtaaaccctgattaaaaaagaaatccgccagccatgccgcattggtatcaatgatttgaccatgcaacacttcatcgccggtggacagcatttccacattcaacattgctcactccttgcctgccaggtgagaaatactataacgcaaagcgggatgctgacgaggaggaaaatctggcgcagcaagaagatgccgcgccggaagagattagaagctggcgctggcgccgatgtatgggccgtcggcgatggtgttatcgcggttgccatctttgcccgccaggttcaggtaacggtagccggcctggatgctaagcggacgcataatggtccagctggcgccgacgttggcttcctggtagctatcaatgccgctggagagcgaatccggagagtagtaataatcgccgtacaggcggaagctgtcgccgattttccactgtaggccgccgccgaccgcggccgcataaccttcatcgccctgtttcggattggtgtaaatacctttaccacccacggtcgcgaggaacggccccagcggaatattgagtcccaggcctaaacccgcggcgtcgccgtcgttatcgctgtgcagccagttacccgaaacggccaggccggtggactcggtgccgaagccgacgccaaggttggtgtaatgctcgccggcttcaccggtaacgctaatcgcatgggccgccgaagaaaccatcatcacgcccgccagcgccataaaaatgctttttttcattatttactctatccagaaaattaaaatcaaagaagtcccgaaaaaacctgaaaattctactgcgcacccatcaggaatcaatgacctggcgaaatgaattttcacaagagtgtaaccagttgcgtatttttacggcatcgagcgttgccagaaccacgaacagcctattcaacgccagtaatattcatgtttattatgattaacgctgacacattgacgaaaacagagagctggcgccgcacgatcggcgcggcgcgggtggataagggaataattaatgctgcagccgggccagacattccggggcgaggccggtcagtttcgccaccagcgacaggtcgagtccgttagcaagcatcgcccgggcgatacgctccgcggtctgctgctcaccttgctcgataccttgttcgataccttgctgtagaccttgttcaagaccttgctttaatccttgctgatggccgcgttgttccagaaactgggcaatattcattagcgtctccttatgcggccgccggggaacgttttgcgcaagatggcgcaaaaaagcaaccggatcggcggcgtttcctgcctgtaataaatagtgcaacagcgtcttaagctgcctgcggctagtgtatcccagcgccaggagcctgaccagttgctcatgcaggtccatcaaatcccgctggcgaatatgcttctgcagcagctccagcatcgccacgcgccggtggcgcatgatttcatcgtccggggtgctagtgatatcaattaagggaaaatcttcaccatagacccgccgcgcgatgtccggatcggcaaagcctgccagccagcacatcgggtaaggccagggagaaacgcgaccatgataaaacagcagcgggatcaccagcggcagctgcgtatgccctttatccagatgacgctgcatcgcggctatcgcatagcgcatcaggcgaaatgccatatggcggtccgccgagctttggtgctctatcaacagatagatatagccctcccccgcctgcgtttgcagcgagtaaaggatatcggaatgactcgcccgcagttcgtcgtcgataaagctcccggactccagccgcagcgtgttcaggttacataacgcgcgcagcggtgcgggaaggtgaatgtccagaaaatccctggccgtcgcccgatgcgacagcaggtgtttaaatacagcatcgtggggggaattcgtcgccctttccatggcggtgctccatacaatcattttcgcttaacgtagcactcaacaagacctgaactgtatttcgcttgcagtttaccgaggcggctcgcaaactatttcaccagcataccgccccatccctctgcaggagaaaacccatgcgccacaggacgattgtttgcccgctgatcgagaataaaggccattatctgctttgcaaaatggccgccgaccgaggggtttttcccgggcaatgggccttatccggcggcgtggagccaggggaacgtattgaagaggcgctgcggcgggaaatacgcgaagagctcggcgaaaaactcatccttacccatatcgcgccatggtgctttcgcgacgatacccgcgtcaaaacctaccccgacgggcatcaggaaacgatctacatgatctatctcatcttcaactgcgtgagcgccaatcgcgatgtgacgatcaacgaggagtttgacgattacgcctgggtcaaagccgaagatctcaaaaactacgatcttaatgccgccacccgcgttactctcagcctgaaagggctactttagtccagcataccgcgttcaacccacccggcgttatgccgcgggataatgcgggtggctacgatacggtcgcatgcgtctgctgcctgacccactcgcacagcgcccggcgcgaaatcttaatcccgccgttttttaacgtttccggcaaccgcagccaacgcaccggctgctgaaaacgcgctaaccgctcagcgctccatgccgccagcgcgctcaactcgcagccgtcatcgcattccaccaccgctaccgggcgctggccgtattccgcatcatccagcggcacgataaacacctgctgtacctgtggatgggcgagtatcacacgctcgacctcttccggttgaataccttctccaccgctaaaaaagaggttatccagtcgcccaacaaccgtcagccgaccgttatgcaatgctccgcgatcgcgcgtcgcaaaccagccttcattgttggttaatgacaacaattgaccatcccgccagtagcctgcggccatactcgacgcccgcagccagatctcgccggcgacaattttcacctctcgccccggcagcgcttcgccaacatccgcagcgccgtcggcctctttggcacacacggtggaggcgaattcggtgaggccatagccgcagaagctgcgtatgccctgctttcgcgcccgttcagtcaattcgaccgggatcgacgcgccgccgagcagcaccgccttgagggaaaccgcagcatcatcattcagcaggcgccatagctgagtcggcaccagcgaagcatgggtacagccgtgcagcatctgcgccagcggctgtttgtcacgtaccgtgagtcgcgcgccggccagcagccagcgccagacgatcccctgaccggagacatggaacaacggcagcgacagcagccagtcatctcctgcggcaaacggcatcagcgccagcacgccagccgcgctggccagatgggcgttggcgctatgtaccgccgctttcggcaggccggttgaaccggaggtcaacgtcatcgacaccaaccgatcgccatgccaacaaacggcacaagcgccttctgccgcctgcagagttaacgccggtaaattccccggcagcgtatcaccgttaagcaccagttgatgctgtacggttaacgcaggcagcagttcctgcagcaacaccgctggcagctgcggattcagcggcagcacccgcgccccgcactgtagcagcgccagccatgccagcagagtttccggctggttataggcccggagcgccacgccctgcccttccattacgccctgcgcggcaaaaccagacgccagcgcgtcaacccgcgcgcatagctcccgccaggtcagcggctggttattcagacgtaaggcgagggcctctccgcgccgctgacgccaatgccgccagggccagtcgttaaaggtcacagcagcggctccagcgcatcaatgttgagcaccggcagcgcactttcgggccacggccgtaccagctgggcgcccatcagcgacagcgtatccagcccaggaatagtctgcggcgtcagccaggcggcaatccgcgccagctgggtcaagccgaggctggactcgatcgacgagctgatcactacgctcaaccccagcgcatgcgccgcggcgacctgttgctgcaccttctgcaaactgccggttagcgtcggtttgatcaccaccgcacgtacgcccggctcggcgacaaagcggaaatccgcctcgcgcaggctttcatcccaggcgatagcgatccctgtctcgcggctaaaggcccgagaatcctcccgcgttttgcaaggttcttcaagaaaagcaatgcgctggcggtacgccggattaacgtatttggcgaactgttgcgctttgagcggcgtccaggcgcggttggcatcgagccgcagctgcaggtcggggatcgcctccagcagcagattgaccaccataccgtcgcggaccgcctcccagaggccaactttgaccttagcgaccttctcgccgggcatcgccgccagtctggcgaatagctcatccggatcgccggagcagagcggcgccgcgcgataatccgcggcctgcggtagttcgccgccaagctccgcctgcgcgcagctgatgccaaacgcgacggagggctgcgtgggaagcggcggctcggcgccgtcgcgccaggcctgtgcccacgctaacagcgccatttgcgcctcttccagcgtctcgacactgaatcccggcaggggagaaatttcgccccagccttcgcgttcaccctcctgcaggcggatgaacagcccgtcgcgggtttttaaccgccgctcgcgcagcaccacgcccgcgtccatcggtatctgccagcggtaaacctgcgaaacgcgcattatggattccgtttaaatttgctgaagtccggctgacgtttctggttgaaggcattgcggccttcctgcccctcttccgtcatatagaacagcatggtggcgttgcccgccagctcctgcagaccagcctggccgtcgcagtcggcgttcagcgccgctttcaggcagcgcaaggccatcgggctgttctgcagcatttcacgacaccagcgcacggtctctttttccagatccgccagcggtaccacggtattcaccagccccatgtccagcgcctgctgagcgtcatactggcggcacaggaaccagatttcgcgcgcttttttctgcccaacgatccgcgccatataggaggcgccccagccgccgtcgaaagagccgacttttggcccggtctggccgaagatggcgttttccgccgcgatagtcagatcgcacatcatatgcagcacgtgaccgccgccgatagagtagccggccaccatcgcgaccaccggtttcgggcaggtgcggatctgacgctggaagtcgagcacgttaagatgatgaacgccggagtcgtcctgatagccgccgtagtcgccgcggactttctggtcgccgccggcgcagaaggctttctcaccttcaccggtcagcacgatgacgccgatattgtcgtcatagcgggcatccgccagcgcctggatcatctctttgacggtcagcgggcggaaggcgttgcgcacctgcggacgattaatggtgattttggcaatcccgtcagtcgatttgtgatagcgaatatcggtatagccttcggagcaatcgtgccattcaacgggggcgtagagcattgcttcatcaagagagatcatagaatgtccttcagttaacttgccagaatctgcgccagacaggcaatcaccgccgccgggttgtcccggtgcgcgttgtgtccggcatggtgaataagatggagatccgccgcgagcgtctgcgcgatggcgcgaaacttcgcgtcgcgctcgccgcacaggtagtgaaaaggaaaatcgcgcgcctgcagagacgcgcgcagatcggcctgcgcggcaagggaggttgcctgcagcatcgccgccagcgtcgcgccgttgttccggctgcgtaaggcgaccaatgactcacgctgcgcggcattcagcgaagcgaagaccggctgctgataccagtcggcaaagacctgctcaagcggctcgcggcgaaaacgttccgcccaggcgctgtcattgctgcgccgcgcctgccgcgcctctgcatcctgcaggcccggatggccgccttcaacgatcagcccgcgcatgcctgcgcgcggctggctggcgaagttcattgccacccggccgcccagagagtagccgatcagccaatacttatgtatgttgtaactattaagcgtagactgcagcagagtattgaccccggcaaagtcctgcaccgcgatatccgcggagccgccgtgccccggcagatcgaggtacagccgcggccaggcgggaaaggcgtcgcccactttccgccactcgttgcggtcgccggaaaaaccgtgcagaaacaccagccagggatagcccggctggccgttgtcgacagcagcgctgaggatcacaggcgacttacctgcgccagcagctgctggagggtctgcgcgccgtcggtctcattgaccgccagctcaatcaccgtcgcccccgccctgcgccaggcgccggccagcgcctcatccagcgacggccagtcatcagggcgatgataggccaggccgaacatcaccgccgcgtggctgaaatccacgtcctgcggcattaaatagaactgacggcgttcgtcctgcggcgtcggcagcatagaaaaaatctgcccgccgttgttattcaccacgatcagcaccagcggcgccgacgcctggcgcagcagggccagcgagttgagatcgtagagcgcggagagatcgccaacgatggccagcgtcggtcgggcgctggcgcgctgcacgccggccgcagtggcgatcaggccatcgatgccgctggcgccgcggttgctgtagaccggatacccagccggtagctgcgccagggcgtcgatcaggcgcaccaccaggctgttgccaacaaacaattggccctgctccggcagatagcgccgaatacgctgcgccagctgcgcttcgccaaaaggctcgttgctggcgaccgcagcctgccacgcctgcccggcaagctgtgggatcaccgtcgcccacggctggcgtttctccgccggatgtaattcgagccagcgctcaacgcttgagagcagacggcgaccgcagtgctgcgccgggtcgaggcgaccgggcagattatccaccagccagtattcatccggctcgcaggtcgcctgccactggagcacgcgtttgccggtcaggctgctgccgagttgcacgacgatctgcgcctgcgccagctcgctgaccgctttgccgttgcccagccacaggtcggcgcacggcagcggctgcccggtctgcgacaggacatcgccgatcagcggccagccgagggtctgcgcccactcagcgacctttttcccttccgcggcactcattctgcccgccacgacgacgccgcgtttttgtcgccagaagaaccagtcgcgctgcttctcgctctctaactgcagcgcctggcgcagccagggtttgtcgctctgccaccagttgccgagctgctgctgccactccacgccggtctcatccatatcaccatacagcggttcagcgaacggacagttaatatgcaccccgccggcgtgcagcgcccccagcgcctggtcgatggttgagaccagccagcgggcaggaatatcctgcgagggacgcggcaaagaaatcgtctgcgcaggatgggaggcaaacatccccggctggcggatagcctggttcgcgccgcagtcgatcagctccggcggacggtcggcggttaacaggatcagcttttcaccggtgagccctgcctcaatcagcgccggatagaggtttgcggtggcggtcccggaggtgactatcaccgccaccggctgccggctggccttcgccagtccgagcgccaggtggccgaggccgcgttcgtcgaaatgggtatgatggataaaggcgcggttttccgccgccgccagggttaagggtgtcgagcgcgagcccggcgcgatgcagatatgctgcacgccatggcgcgttaaagcttccaggatcaccgccgcccagcgtcggttaaatgcgcttactgacatgaaattgtccggtatcaaatattgatgctaagtatagataaggcaaagtgacgtcgttttgatatgcatcgtcattcaagctttatggacacagcagcgagcgcagcccggccgctttgttgtcaatctcctgccactcctgctgtgcatcagagccgctgacgatccccgccccggcatacagccgcagggtgtcgtggtccactttcgccgaacgcagcgccacgcaaaactcgctttgcgccagtgacagatacccggcggacccggcgtaccattcgcgggaaaacggttcatgacgctgaatgaacgccagcgccgcccggcgcggcaggccggccaccgcggcggtgggctgcagctgcagcagacagcggctgtcgtcaggcgccgccagctcggtccagatgcagcgtcggagatgctgcaccttacgcagcctcaccacctgcggcggcaggacgtccagcgtcgaggcctcactctgcaggcgctggcagatatcctctaccaccagcatgttttcccgctggtttttgtcgtctttcatcaaccagtcggccagttgctgcgccttcgcgtcttcctgatggttcgcgacggtccccgccagcgcttcggtgcgcagcagcgcgccgcgccggcgccacagccgttccggcgtggagccgaaaaatgcctgccgggcattgaacgccatcaggaaatgaaaacagttaagattgctgcgccggctagccgccatgatgctcacggcgtccagcggggcggcaaactgcaggtcggttgcccgcgccagcactactttatccatttcaccggcgctgatcgccttagtcgcccgcgcaatcattgcctgccattgaggatagtcggatgagtggcgctcgctcagcaacggcggtatggcgccgggagtcgcctgagtggttgtcaggctggcgagaaacgcgcgggccgtcgcggcatcctcacgcagggagatatcactatgcagcaccagccgcagcacggccctgccgccgcaccggcgccactccagacgcggcagcgccaggctgccctgctgcggttcaaacgcattcaggccgcagatacgcagatcctgccggccggcctggcgtaaaaagcggttcgccgcgtcgagcgaggtaaaggtttttaccgcccccagcgtcgccagttcctcatcgccattgcgctgctgccagtaaaactgcggccattgcgcctgctggccgcaccatagtagcggatcgaaggcatcattcagcggaaaggcaacatcgataattcgcgtgccgggcgagtctggaaaagactcgcccaggccgtcttgcaaacgggccagcgcagtggaaacagacagcacgcaaacctccacggttgtaaaaccccacattataaggggttcgacggcggaatagcagtacccatgatgagggagcgggttttatcttacccgctcgccgggccagagctgcgtgtggacgagggtgcagaggagtcagacagcgcgcttttctcgcgccatgccaatgtgggggatgccatcctcatcatagacctcggtcaccggcgtaaaaccaaagtgggcgtaaaaggattgcaggtgcgcctgcgccccgaggtaaatcgccttttgcggccagtgctgctgacagctggccagcgcctgctccatcagctgatagccgagcttcgcaccgcgggcggcggggctgacgatgacccggccaatcaccaccggcgcaaactcctcttcgcttttgaggatccgcgcgtaggccaccagttcgccatcgcgccagccgagcagatggcgattttcaccaaccaaatcatcgccgtcgacatcctgatagacgcactgctgctctacgacaaagacttcactgcgcaatttcagcagcgcatacagctggggaacggtgagttcactatggtggagatcctgccaggtcatcatctgctgctccttattgatatactgatactttgcgactcgccctgaggacactggacgatggaattaacttttttggggacatccgccggggtgccgacccgcacgcgtaatatgacgtcgataatactgaatttgcaacagccgacccgcgccgaaatgtggttgtttgactgcggcgaagggacccagcatcagtttcttcacacgccctaccatcccggcaaactgaataagatttttattacccatctgcacggcgaccacctgttcggcctgcccggcctgctgtgcagccgctcgatgcagggaaactcccttcccctcaccctctacgggccaaaaggactcaaagagtttgttgagaccgcgctgcgcctgagcggttcgtggaccgactatccgctcaccatcatcgaagtcggccctggtctggtgttcgacgaagagggctatcgggtcaccgcgtatccgctcagccatccggtggagtgctatgggtatcgcattgcgcagcatgacaagcccggcaccctcgacgccgcccagctgattgccgatggcgtgcctcccgggccgctgttccatcaactcaagcgcggacagcgcgtcgagctggcagatggccgggtcattgacggcagccgctatctggggccatcgacgccgggtaaaacgctggccatcttcggcgataccgccccctgcccgcaggcgctggagatggctcgcggggcggatgtaatggtccacgaaaccacccttgagcaggcgatggcggagaaagccaatagccgcggccactcttccagtcagcagaccgcggcgcttgccaaagaagcgggggtcggtacgctgatcgccacccactttagctcgcgctacgatgccgaaggctgtctgcgtatgctggcggaatgccgggagattttccctaacacgctgctggcggaagactttatggtctacaagatggcgtaaaatccgggcataaaaaaaccgccatcccggcggttttttattgagtcaatcaacttacatcagcggcgtcgccagctgcacgatgctaatcagcggctgcggccagataccgagcaccagcaccagcagcgcggagatcagcaccacgataccgccggcgctgtactgccagtttgacggcgcatcgcgattcagttgctccggcgcgctcaggtacaggctcactgccacgcgcaggtagtagtagagaccgatcgccgagccgacaaccaccgcggcaaccagccaccacagatgcgcatgcacaccgacggccagcacgtagaacttaccgataaagccgagggtcatcgggatgccggccagggagagcatcatcaccgtcatcacagccgacaggatcggacggtgccagaacaggccgcggtaggagaacagcgagtcagcatccgggccgcggtacgggctggacatcaggctgaccacgccgaacgcgccgaggctgctgaacaggtaaccggccaggtagacgcccacggcttccatcgacatttcaccgctctgcagggcaatcagcgccaccagcagatagccgagatgggagatggaagagtaaccgagcaggcgcttaatgttggtctggctcagcgccatcaggttaccgaagatgatagaggcgaaggcgatcaggcccagcaccacgcgtaccgcttcgctgttgcccaccggcatgtacaggaacagacgcatcactacgccgaagatagcgatcttgctggcggtcgccaggaaggtggagaccggcgcaggcgccccctggtaaacgtccggcgtccacaggtggaacggcaccagcgacagtttaaagccaagaccgacaatcatcaggccaagacccgccagcagcagcggctcgtgcagcatgttgtccgccaggcttttgcccagcgcgaggaaggacaggttgccggagttcgcatacaccagcgccataccgaacagcaggaaggacgaagctgccgcggagaggatggtgtatttgatgctcgcttccagcgaacgcttctggcggaaggcataaccaaccaggccgaacagcggcagcgaaatcagctcaataccgaggaacagcgccgccagatgattcgcaccggccagcagaatgccgcccagggcggcgatcagcaccagcaggtagaactcttctttgttgtccttgtaaccctcaagccacgggtaggcgaaagtacaggtcgcgaggctcgccagcagcaccagaccggtgtaaagcatggcgtagccgtcaacgcggatcagcggcgtgacgtccatcgccccgttctggccgacgaaccagagcgagaccagcgcggcgttaagtccaagaaccgacagcgtggcattgagaaaatgattgcgtcgccacgcaatggagagcatcacaaccaccaccgtcaagccgacgatcagcagcggtagcagtgcgatcagttgttgtggagttattgtcatggcgaattacggccttgtagtagaaacagaattaacaaaccactgctgaatgttgctcatcgcagcatgcgaggtgtcgaggatcggctgcgggaagaagcccaacagcaccagcagcaccaccagcagcaggatgatagacagttcacgcagggacatccccggcaactctttcgccgccacttcgctcttcgctttaccgaagtaagcgcgatgtaacatcgacagcgagtaaacggacgcgaataccagaccaaaggtggagatgacggtgatcgtcggcaccactttatagctgccgaacaggatcataaattcgccgacgaagttaccggtgcccggcatccccagggtggcgaccgcgaagaacatcgacatcgccggcagccatttaattttgctccacaagccgcccatctggcgcatatcgcgggtgtgcagacgttcgtacagctggccgcacagaatgaacagacccgccgcggacagaccgtgagcaatcatctggatcaccgctccctgataggccagctggctgccggtgtagatagcaatcagcacgaagcccatgtgggacacggaggtgtaggcgatcaggcgtttaatatcggtctgggcgaaggccatccacgcgccgtagaagataccgatcacgcccagccacatggcgatgggcgcaaactcggcggaggcattcgggaacagcggcagcgcaaagcgcagcaggccgtaggcggcggttttcagcaggatccccgcgaggtcgacagagccggcggtcggcgcctgggagtgagcgtccggcagccagccgtgcagcggcaccaccggcattttcaccgcgaaggcgatgaagaagccgagcatcagcaggtattccacgccgtgagacatcggggttttcagcagatcttcatagttgaaggtccacacgccggtggcgttgaagtggacgaaggccagcgccagaatggcaatcagcatcaccagaccgctcgcctgggtatagatgaagaacttggtagccgctgtgatacgcgttttaccgtccgaggctttgtggccccacagcgcgatcaggaagtacatcggcaccaacatcatttcccagaagaagaagaacaggaacatgtcgatggcgaggaacacgccgataacgccgcccaggatccacatcaggttgaggtggaagaagccctggtatttttcgatttcacgccacgaacagagcaccgccagcacgccgaggagaccggtcagcaccaccatcagcagcgacaggccgtcgatcgccagatggatgctaatgccgaagcgtgggatccacggcagcacgaattccgactgccattgcggaatacccgcggattgcgtcagagaatagccgccctgcatccacagctgcaggccaagcaccagcgtcagtcccatggtaatcagcgcgatccagcgcggcactttcacgccaaagcgttcggtctgccagcacaggaagccgccgataaagggaattaatattagccagggtagtaacatggcgatttttattccttgttaaagtcccgttcaggaccgattttcaacgaattcgactacattcacgtttgagtgcggtttgttgtgtcgggtggcgcttcgcttacccgacctacggtctcgtaggcccggtaagcgaagcgccaccgggcaaaaccgcgcgatcaaatcaacgcaataccatcagcagcgccagcaccaccaccgcgccgatgctcattgaagccacataccagcgcagataaccgttctcgctcaccagcaggcctttgcctgcgaagcgggaaaggatcgccgggatattcatcaacgagttcagcggatcgcgtttcagcagccaggcaataccgaggaatggttttacgaacaccttgtcgtataaccagtcgaagccccaggcatggaaccaccaggtaccgaagaagcggccaggcgcactgttggcgatggaggtcaccagcgtgcgtttgcccagccacagccatgcagcgatcagaatcccggcaatggcgatgatcccggaggcaatctccagcgtcatcacgctaccgtgggcgagctcagtggtctgcggcagtacgccttccagcggcggcacaatcagcgcgccaacgaaggtggatagtaccagcagcacaatcagcggcagatgatgggtaatccccttccctgcgtgcgcgtgaatttgctctttaccgtggaatacgatgaaaatcatccggaaggtgtacagcgaggtcataaaggcgccgaccaggcctgccaccatcagattgatatggccattggccatcgcgcctgccagaatctcatccttactgaagaagcctgcggtgataagcggcagtgcggacagcgccgcgccccccaccaggaagcagacgtataccagcggaatcgatttgcgcaggccgcccatcttgaagatgttctgttcgtgatggcaggccagaatgaccgaaccagacgacaggaacagcagcgctttaaagaacgcgtgagtcatcaggtggaaaatcgccgcgtcccatgcctgcacgcccagcgcgaggaacatgtagccaatctggctcatggtagagtaggcgagaacgcgtttgatatcggtctgcaccagcgcggcgaagcccgccaacaccagggtgaccgccccgacgataccgaccagatgcagcacttccggcgtcatcaggaacaggccgtgggtacgggcgatcagatagacgcccgcggtgaccatggtcgcggcgtggatcagcgcagagaccggcgtcggacccgccatcgcatcggcaagccacgtttgcagcggcagctgggcggatttaccgaccgcgccgccaagcagcatcagcgtcgcccactgcagcgtggtgctgccgttagcgaagtgctgcggcgccagctccaccatttcgcggaagttcagggtacccagttcgttataaagaatgaacagcgcgaaggcgaggaacacgtcgccgacgcgggtcaccacaaacgctttcatcgctgcggcgccgttcttcggatcggtgtagtagaaaccgatcagcaggtaagaacagaggcccacgccttcccaaccgaggtacatcagcagcaggttatcggccagtaccagaaccaccatgctggcgataaacaggttggtataggcgaagaagcgggaatatccctcttcaccgcgcatgtaccaggaggcgaacatgtggatcaggaagccgacgccggtaactacggagagcatggtcagcgacaggccgtccaacaccaggttgaagccgatgttgaaatcaccgaccgacatccaggtccacagcggcacgctgaccgcctgtttgccgttagcgaaaaagtcgacgccaacgtacgcggtgaccagcgccgccaggcctaccgagcccatgccaacggtggcggaaagattttccgaccagcgcccgcgggagaaggccagcagcacaaagccaatcaatggcaaaagaatggttaaggcaagcatgttcatccacgcaactcacttactgaatcgatgttcaggttctggcggcgacgatggagctgcagcagcagcgccaggccgatactcgcttccgcagccgcgaggctgatggcgaggatatacattatctgaccatctgcctgaccccagtagctacccgccaccacaaaggccagcgcggcggcgttaatcatgatttccaggctaatcaacataaacagcagattgcggcggatcaccagccccgtcagaccaagcacaaacaggatggccgcgaggatcagtccatgtgttaaggggatcatgcgtgttcctccgtttttcgtttgtcgctgtcgttcagacggttgctcagcacctcgccggcgcgctcttcgcggccaatgtggaaggcaaccaccaggcccgccagcagcagcatggaggccagctccaccgccaggacgtacggcccaaacagcgcaatgcccacttctttggcgttaatcgccgcaccgtcgataccctggtcgttaatgcccaggatggcgtaaacgataaccaccagcagcaccgcggagaggatggccgggccaatccagatccccggctgcagccacttgcgctcctgttcgatctcggtgccgcccaggttgagcatcatcaccacgaagacgaacagcaccataatggccccggcgtagacgatgatttccagcgctccggcgaagtacgcgcccagcgagaagaacaccccggcaatcgccagcagcgaaataatcaggtacagcagcgcatgcaccggattggtgtgggtgacgacccgcaaggttgcgaggatggctatcaggccacagatataaaaagcgaattccattgcccctctccttacggtaacaggctcttgacgtcgattggcttagcttcattttccgcttcgcccttatctttgccgtcgattgccatacccgccatccggtagaagttatattccgggtatttgcccggaccggaaatcagcagatcctctttttcgtacaccagatcctgacgcttgtattcacccagctcgaagtccggggtcaactggatcgccgtggtcgggcacgcttcttcgcacaggccgcagaagatgcagcgtgagaagttgatgcggaagaactccggataccagcggccgtctaccgtctctgctttctgcagcgagatacagcccaccgggcaggctaccgcacacaggttacaggcgacgcagcgctctgcaccgtccggatcgcgggtcagcacgatgcggccgcgatagcgcggcggcaggtagaccggctcttccggatacatccgggtttcacgtttggcgaaggcatgcaggccaatcatccagatactacggacctgggtgccgaaccccaccaataattcttttaaggtcatgttcaattcaccccttattgcgcctgccagagaatgacagccgccgttaccaacaagttgaccagcgttaacggcaggcataccttccagccaaaggacattacctggtcatagcgcggacgcggtaatgatgcgcggatcaaaatgaacatcatcatgaagaacgcggttttcagcgcgaaccagatgaaaggaggtaaccacgggccattccagccgccgaagaacagcgtgacgatcagcgctgaaacggtgacgataccgatgtattccccgacgaagaacagaccgaatttcatgccggaatattcaatgtggtaaccatcggccagttcctgctccgcttccggctggtcgaacgggtgacggtgacataccgccacgccggcgatggcgaaagtcacgaagccgaagaactgcgggataacgttccacagatgcgcctggttgttaacgatatcggtcatattgaatgaccccgcctgcgccaccacgcccatcagggagagaccgagaaatacttcgtagctcagggtctgcgcggaagcacgcatcgcccccagcagcgagtatttgttattgctcgaccaaccggcgaacagcaccgcgtagaccgccaggcctgccatcatcaggaagaagaggatgccgatgttcaggtcggccaccacccacgtcgggctaaccggcacgatagcgaaggccagcagcagcgaggtaaaggcgataaccggcgccagagtaaagatcacgcgatcggagaagcgcgggatccagtcctctttaaagaacatcttgatcatgtcggcgaccagctgcagcgaaccgccccagccgacgcggttaggtccgtagcggttctggaacaagccgagcagacgacgctcgccgaagctcatgaacgcgccgcaggtgacaaccaccagcagaatgaccacggccttcaggatgcttaacagaatgtcgataagatccggcgttaaccagctcatgctttcgcctcctgcagtgaatcaatacgcgatccggtcagcaccggcgcaatgcccggcatgcccatcggtaagccaacctgtcccgcggtcaggccttcagagataaccagcggcagacgcagggtctggccttccacgctaaaggagagcattgcccctgggttgacgccaagcttcgcggcatccgccgggttcagcttgatgtacggctcaggcatccggctctggaacaccggcgcgcgctgagacagctcatcgctgccgaacagatggtagtacggcgcaattcgccatttgccctcttccgcctggaagctggccggcaccgccgtgaagtactccagtccgctggcggacgcttcaaacagacgaacgcccggatcgccgtggcgcagtttcccgcccacttcatcctggaacttgttccatgcctgcggggagttccagcccggcgcccaggcgaacgggatctgcgaacgcggggcggacggctggttgttcccttccatggagaaggcgaacatcgtgtctttatcctgcggctgacgcggctcgtgcacgctgatgttagcgcgcatcgccgtgcggccgctgtagcggtgcggttcacgcgccagcttctggccgcgaatgcggaaggtcgcatccggcgcggcgtctttaatgcccgccagctgcggcagcgcggcaatcgccgcatcaatgacgtggtccagctgagtccagtcaacctgacggttgttgacggtgctgtgcagcgaatgcagccagcgccagctttccagcattacggttttcgcgtcgtagtaagccggatcgtaaacctggaagaaacgttgggcgcggccttcgttgttcaccacggtaccgtcgctttccgcaaagcttgccgcggagagcaccaggtgcgctttgtccataatcgcggtgcgctgatgatccaccaccatcaccagcggcgctttcgccagcgcagcgtcaacgcgcgcggcggaagcatgacggtgaaggtcgttttccagcacgataaccgcgtctgcggcgccgctttccagttcgtccagcgcctcttcaagcgagccgccgccgatcatgcccagtccgacgctgttaaccgcccgggcgaccatggtcaccccgacatcggcgccgcggcctttcagagctttcgccacgttagcggcggcctggatgatctccatgctgccggcgttggtcccggagatgatcagcggttttttcgccccggccagcgcctgaacgataacgtcgactttaccctgcaggtcctggctcaggccgtcaaccgccggcgcgctgtcgtccagcgcatgggcaatagcaaagccgagacgcgcctgatcttctaccggcgcgcggtaggtccacgccgcgatgtcatccaggcgggtgtcatcgacgttggtgacgaatagcgggtgcttggcgcgctggccgatgttgaggatcgcggcgatctgccagtcggccactttctgcgccgccgccatttcgcgtgctttccctttcactgcctggcgtaccgccagggccacgcgcgcgccggtctgggtaatgtcttcgcccagcaccagtaccgcatcgtaggattcgatatcgcgcaggcttggcgtgtggatcccgccctcgcgcagcactttcagcatcatctgcaggcgcgcttgttcgcctttggcgatgccggtatagaagttgtcggcacccaccagctcgcgcagcgcgaagttgctttcaatgctggcgcgcggggagccgatgccgatcactttcttcgactggcgcaggatatccgccgccccctgcatcgcctgctcggcgttaagggtgatcagatcgtcgccgcggcgctgcaccggctgacgcggacggtctttcaggttcacgtagccatagccgaaacgaccgcggtcgcagaggaagtagcggttcacggtaccgttatagcggttttcgatacgacgcaactcgccatagcgttcgcccgggctgatgttacagccgatggaacactgctggcagatgctcggcgcaaactgcatgtcccacttacggttatagcgctcggagtgggttttgtcggtgaagacgccggttgggcagacttccaccaggttgccggagaactcgctctccagggtgccatcttccgggcggccgaagtagacgttgtcgtgcgcgccatagacgcccagatcggtgccgtcggcataatctttgtagtagcgcacgcagcggtagcaggcgatgcagcggttcatttcgtgcgaaataaacggccccagatcctgattgcggtgggtacgcttggtgaaacgatagcggcggaagctatgaccggtcatcaccgtcatatcctgcaggtggcagttgccgccctcttcgcagaccgggcagtcgtgcgggtggttagtcatcaaccactccaccacgctttcgcggaactgcttcgcttcgctgtcgtcgatagaaataaaggtgccgtcggatgccggagtcatacaggacatcaccaggcgaccacgcgtgtcttccgcgttctgatattgcttcaccgcacactggcggcaagcaccgacgctccctagcgccgggtgccagcaaaagtagggaatatcaagaccaagagagagacaagcctctagcaggttgtccgccccgttgacctcgtattctttgccgtctacatgaatcgtagccatttgcgtgcttccaaaaataaaaaacctttagattaccagcgcgtcttaagcaggttcggctgaatcccgttgattgcatgggtattgctgaactgctgcttaatgccagcctcgaattcttcgcggaaatatttaatcgcgctctgtagcggctcgaccgcgcccggcgcgtgcgcgcagaaggttttacccgggcccaggaatcgacacagttgctcaagggtttcgatatcgccaggctggccttcgccgcgctccagggcgcgcaggatcttcacgctccacggcagaccatcgcggcacggcgtacaccagccgcaggactcgcgggcaaagaactcttcaaggttacgcaccagcgagaccatgttgatctcgtggtcaacggccatcgccagcgaggtgcccagacggctgcccgctttaccaatgctttcgaattccatcggcagatcgaggtgcgcttcggtgaggaagtcggtccctgctccgcccggttgccaggctttaaacttcaggccatcgcgcataccgccggcgtaatcttcgaggatctcgcgggcagtggtgccgaacggcagctcccagacgcccggattcttcacccggccggagaagcccatcagcttggtgccagcatctttgctggtggaaatgttctggtaccactcgacgccgttggcgaggatcgctggcacgttgcacagggtttctacgttgttgacgcaggtcggcttgccccagacgccggagctcgccgggaacggcggcttggatcgcgggttggcgcggcggccttccagagagttgatcagcgccgtctcttcgccgcagatatagcgccctgccccggtgtgcacgaacagctcgaagtcaaacccggtgccgaggatgtttttccccaacagacccgcttcggtggcttcagcaatcgcgcgacgcagatgctgggccgcttcaatatattccccgcgcaggaagatgtagccgcggtacgctttcagcgcaaacgcggagatcagcatgccttccaccagcaggtgcggcagctgctccatcagcaggcggtctttataggtgcccggctccatttcatcggcgttacacagcaggtaacggatgttcatggattcgtctttcggcatcaggctccacttcagaccagtggagaagcccgcgccgccgcgccctttcaggccagcgtcttttaccgccgtgacaatctcatccggggccatcccggtcagggctttacgcgccccttcatagccatttttactgcgatactcgtccagccacaccggctgcttgtcgtcgcgcaggcgccaggtgagcggatgcgtttccgcagtacgaattacggttttcatttgtactgctccagcaggtcaggaattgcctccggcgtcagatggctgtgagtatcctcatcaatcatcatggtcggtcccttgtcgcagttacccaggcagcaggtcggcagcagggtaaagcggccatcaaaggtggtctgccccggcttgatattcagtttcttctcaatggcggcctgaataccctgatagccggtgatgtggcataccacgctgtcgcagtagcggatcacgtgacggccaaccggctggcggaaaatctggctgtagaacgtcgccacgccttccacgtcgctggccgggatccccagcacatcggcgatggcgtagatcgcgccatccggcacccagccgcgctgtttctgaacgattttcagcgcttcgatggacgccgcacgcgggtcttcgtagtggtgcttctcgtgctcaatagcctcacgctctgccgcactcagctcaaaagcctcggtttgtggttgttgattctcgtgcataattagcggtccacgtctgacataacaaaatcgatactacccagatagacgatcaggtcggataccaggctgccgcggatcgccgacgggatctgctgcaggtgcgcaaagctcggcgtacggacgcgggtgcggtagctcatggtgctgccgtcgctggtcaggtagtaactgttgatccctttggtcgcctcaatcatctggaaagattcgttggccggcatcaccgggccccacgatacctgtaggaagtgggtgatcagggtttcgatatgctgcagcgtgcgctctttcggcggcggcgtggtcagcgggtgatccgctttgaacgggccttccggcatgttatcgaggcactgctgaagaatgcgcagactctggcgcagctcttctactttcagcatcacgcgggtgtagcagtcagagacgccccccccggtcgggacttcgaagtcgaagttttcatagccagagtaaggacgccatttacgcacgtcgaagtcgataccggtggcgcgcaggcctgcgccggtggtgccccactccagcgcctctttggcggtataggctgccacgccgacggaacggcctttcagaatggtgttgcgcagggcggccttctcataggagtccagacgcttcggcatccactcgaggaactcacgcagcaggcgatcccagccacgcggcagatcgtgcgcgacgccgccgatgcggaaccacgccgggtgcatacggaacccggtaatcgcttccaccagatcgtaaattttctgccgatcggtaaaggcgaagaagaccggcgtcatcgcgccgacgtcctgaataaaggtcgagatatacagcaggtggctgttgatgcggaacagctcggagagcatcacgcggatcacgttcacgcgatccggtacggtgatcccagccagtttttccaccgccagcacgtacggcatctcgttgacgcagccgccgagatattcaatacggtcggtatacgggatgtagctgtgccaggactgacgctcgcccatcttctcggcgccgcggtggtgataaccgatatccggtacgcagtcgacgatctcttcgccgtccagttgcagaataatgcggaacgcaccatgcgccgatgggtggttcggaccgaggttgaggaacatgaagtcctcgttgtcggtgccgcgcttcatgccccactcttccggtttaaaggtcagcgcctccatctccagatcctgtttggctttggtcagctcaaacgggtcgaactcggtggcacgcgccggataatctttacgcagcgggtgaccttcccaggtcggcggcatcatgatgcgacgcaggttcgggtgaccatcgaaggtaatgccaaacatttcccaggtttcacgctcataccagttggcgttggggaacagtttggtgaaggtcggcagatgcagatcgttttccgacagcgccaccttgagcatgatgtcgcggttgcgatcgatggagatcaggtgatagaaaacggaaaaatccgcggcgggcaggccatcgcggtgcgtgcgcagacgttcgtccatgccgtgcaggtcaaacagcatcacgtaaggcttcggcaatttcttcaggaaatcacccacctccagcagctgttcacgcttcacccataccaccggtacgccggtacgggttggctgaacggtaaaggcatccggcccaaagcggttgcgcagttcgccaatcaccgggtcatcaaggtgatcgcgggtttgccaggctggtgcggcgtcatgcgcggttaaatcggtcatattgttcaccattgcaaaaggtccgtggtgactgccggcgagacttcgcgctgttgtagattgatttgcgaagtggttctcccgcccgcaggcgcaaattaaatctcgtccggcgtccgcagattggtcactgcaatacgttcgccgcgtttacgctcgcgttccgactgcatattggcgcgataaacgccctgatcgccaaccacccatgagagcggacgacgttctttaccaatggactcctgcagcagcatcagcgcctgcatataggcctccggacgcggcgggcagcccgggatgtacacatcgaccggaatgaatttatccacgccctggacgacggaatagatgtcgtacatcccgcctgagttggcgcaggcgcccatggagatcacccacttcggctccagcatctgatcgtagagacgctgaataaccggcgccattttggtaaagcaggttcccgcgaccaccatcaggtccgcctgacgcggagaggcgcgcagaacttctgccccaaaacgcgcaacgtcatgcaccgcagtgaatgacgtcaccatttccacataacagcaagaaaggccgaagttgtacggccaaattgagttcttacggccccagttcaccatgtcatgcagcgcgtgttcgagtttccccatatacacgcttttattgacttcctgctccagaggatcggtaacgatctcctgtttctgcagggggtaacggtcgttctcaccgttaggatctatgcgggtgagcgtataatccatcttattgcctcgcttttactgcatatgacggttagtgggactgtctgtttccgggttaaccagcgtgcgacgggaacgcgcaggcgtccagtccagtgcgccgatgcgaacgagataaaccagaccagccagtagcactaaaatgaaaattgcggcttccacaaagccgacccagccgctctcgcggatagaggtcgaccatgcgtagagatacagggcttccacgtcgaagataacgaagaacatggcaaccagataaaacttcgcagaaagacgtaagcgggccgaaccgacggagtcgatccccgattcaaacggcgtgtttttactacgcgcgcgcgcgcgaccgccaaggtaccagccgccgacgagcatgaggcagcacaggccgatagcgatgatgagaaatatagcgaatgcccaatgatgagcgatgacttcagtggatgttgacatacgcattgcttaaccaaaaaagtgtagcgccaaaaccctctgctcttactggcagatgaacgccacagcgtttcacgggaggaataaaaaataaccgtgcaaaaaagcgtccctggtcgatgtgagaagcccagatgccgtggctttttacccctttctttaaccttttgtcaactttaacaaaagttttcataacattaatttacattggaatcttttcattaacattaaatgcccttttctgcgaaataaccttgcatactgttcggttttagtgttgttgaatcgtgtccgtttccgtcgtaaatcaaaaatcccttctattttgacaggatttagcctcgattcctccccccaaagaggggtattttcttgatctgcgacacggttttgttaattaccccaggaaatcggcaacaatccatccggttttttaacattagcaggaagtgttgaaagtgcagggaaaagtcgacaagctgagcgccttgtcacgccaatacgctgatttttctgcaaagaaatacaaaaaagattcaaaacatcaataagagtgcaaaaaaaagagccgccaggcgggaaaccaactcctgaggctctttttgggcacttacattctgttaccagtttttgtgatctttgttagcaagaatacccttacaaaaccaaggtattccctccctcttccggagtaagtgctgtgcccgtttcccagggatggatctcctggctcagagactgaaaaatcgcctgcggcagttcgctcaccgtccgcggattgcagctgacgacgtaccgggtgtccggcaacgccggtaacccctcactgatgccagccacgcgtagatccgggctcatcatttcgaccgggcgcgccgtcacgcccagcccggccttcaccgccgctttcacgcccgatagcgaggaagctccgtgggccagatgccaactgacgcgagcagtttccagcgcggcgataatatcctggcggaatggacttggctcttcgagcaggatcagggggatagattcccccttcgccagcacatattccgctgcacaataccagagagtaggtgatgttctcagggtgaaagaggtaaagccgggaggctgatgggtggtcaacgccagatcgaccagcccctcggccagcatctccatgatggcggcatgggggtgaactttgatctccaacgtcattctgggatagaaacagccgatgcggtttaacaaaaacggcaggatggtgtcagccgtttcttctgacgcaccgatgctcagagccccctgcaggctgccatacatcagcgacatacaggcttcatcgttaaaacggagaattttgcgggcatagcccagcagctggatcccctgctcggtcagcagcttattgcggccgtggcgggcgaaaagctctttgcccaccagctgttccaggcgttgcatttgctgactgaccgcggactgagtacgacacactgcggcggcggcggcggcaaaagtgttcaaatcagcgaccgcgacaaaggtacgcagcagatcgagatcgaggttgagtatgggacgtgttgtattaatcatctttcttcacttacaggtggctaacgctgacctgccttgttgatgctttacgccaggtttccggctattccctgagcctcgtgctcaccgtctaacggcggataaacaactggacgaacgttattacatgccaaagtactcgtctgggcaaatgcgcagaactgcggagtaatatattgttcgtatttctcattattatttattaccacgaccagccaggcgccatacgtcgccgcgggaacccggtcagtgatgctgagaaaatcgctcttctggcgtaactttccggcagaaaatgaacaataaaatcctgtaataacaatatattaaatctcaatgcaaccgcagttcttggcggttaacacggatattaacggtgatattctaacctatccccctcctttttataagccttaataaggattaactgagacaattttaaatttttttcaacattttatattaattaacaaacctcagattattacccgctaaaaataataataatgtggttgcacgctgttttttattaaaattatttaacatcaaaattacaagccaatcgcgcttgtatgcaggatagcgttttttagcgactccccctcctccctccccatattaccgggcaaacaaacgagataaatgatggcaaaatcgctactaaatctatatttacgaccaaaaaatcgacataaaaaggcataagccacagaccaaatccgcaatcggtagataaatcaattgcgcttaaaatccggcgttagcaaaatcttctcctgcaaagccttcaaaacagcggggagggggagtacattgttccgtgctgacttccacggcagggagtggcgataacagctaaaaggtcaagattcatgtcccccatcgaaaaatccagcaagttagagaacgtctgttatgacatccgcggcccggttctgaaagaagccaaacgtcttgaagaagaaggcaataaggttctgaaactgaacatcggcaacccggcgccattcggcttcgaggcccctgacgagatcctcgtcgacgtcatccgcaatttgcctaccgcccagggttactgcgattcgaaaggattgtactcggcgcgtaaagctatcatgcagcattaccaggcccggggtatgcgcgatgtcacggtggaagacatctatatcggcaacggcgtgtccgagctgattgtgcaggcgatgcaggcgctgttaaacagcggcgatgagatgctggttcccgccccggactacccgctgtggacggcggcggtgtcgctttccagcggcaaagcggtgcactatctgtgtgacgaatcctctgactggttcccggatctggacgacatccgcgcaaaaatcacaccgcgcacccgcgggatcgtgatcattaaccctaacaaccccaccggcgcggtctattccaaagaattgctgcaggagatcgtggagatcgctcgtcagcataatctgatcattttcgccgatgaaatttacgacaagatcctctacgacgaagcccagcatcactctattgccgccctggcgccggacctgctgacggtgacctttaacggattgtcgaaaacctaccgcgttgccggcttccgtcagggctggatggtgttgaatggcccgaaaaaacacgcgaagggctatatcgaagggctggagatgctggcttcaatgcgtctgtgcgccaacgtgccggcccagcatgctatccagacggcgctgggcggctatcagagcatcagcgaattcatcatccccggcggacgcctgtatgaacaacgcaaccgcgcctgggagcttatcaacgatattccgggcgtctcctgcgtgaagccaaaaggcgcgctgtatatgttcccgaaaatcgacgccaaacgcttcaatattcatgacgaccagaaaatggtgctcgacttcctgctgcaggagaaagtcctgctggtgcagggcaccgcctttaactggccgtggccggatcacgtacgcatcgtgaccctgccgcgcgaagacgacctggagatggctatctcccgctttggccgcttcctctccggctaccatcagctttaatcgcgccgccgccggcatttgcatccggcggcgatccctgcgcacaatggaacccgatgttgtcactgattaagggtccctatgagtcagagtcatttctttgcccacctctcccgcctgaaactgattaaccgctggccgctgatgcgcaacgtgcgcaccgaaaatgtctccgaacacagcctgcaggtggcgatggtcgcccacgcgctggcggcgattaaaaaccgcaaatttggcggccaggtcaacgccgagcgtatcgccctgctggcgatgtaccatgacgcctcggaagtactaactggcgacctccctactccggtgaaatatttcaattcgcagattgcccaggaatataaggcgattgaaaaaattgctcagcaaaagctggtggatatggtccctgacgagctgcgcgatattttcgagccgctgattgatgagcatcactacagtgaggaagagcagtcgatcgttaaacaggctgacgccctctgcgcttacctgaagtgcctcgaagagctgtctgcaggcaataacgaatttctgctggccaaaggtcggctggaaaagaccctggcatcgcggcgcagcgcggagatggattactttatgcaggtgttcgtcccaagcttccagctgtcgctggacgaaattagtcaggattcgccgctgtaaggttctggccgggcggcggttgtgctctacccggccagaatatcttaaaacggaaacagtaccgggatcagcaggacgcagaccaccatcaccagtatggtaaagggcacgcctattttgacaaaatcgctaaatgagtacttgcccgggccaagcaccagggtgttaaccggcgaggagaccggggtcataaacgccgccgaagccgccatcgccaccaccatggcaaaaggatagggtgagacgcccattgacttcgccgccgctaaggcaataggcgccatcagcaccgccgtggcggtgtttgagataaacagcccaatcgccgcgcacatcacgaacaggcagccgagcatcagataaggcccctcgcctccggcgacatccatcagtcccttcaccaccagatccaccccgccggttttttgcagcgccagggcaaacggcatcatcccaacaatcaaaataatgctcggccagtggatcgccttgtaggcgctttcggcattgatgcagcggaatttgcccatcagcagacaggcgataatcgcggcaatcgggttgggaatttcatcggtgagcatcagggctaccatcagcaccaggcagaaaatcgcatgcggagcctggctgtgggccggcgaagcgtcatcgacctcaaccggcatattgagcaccacgaaatcccggccgcgcttcgccagcaaggcaatttgccgccagttgccgaccaccagcaggatatcgccgagctgcagcggctcgtcgaccaccgaaccatccatcgctttgccatcgcgcttcatgccgacgatattgagaccaaaccgggtgcggaaggctatctcacgcaccgttttgccaatcatctctgaatccgggatcagcgccacctccgccatccccacatccagcgcctgatcggcaaaatactcgccgcgcaataccatcggctcaagcatttgctcgccgcagaactggcgtaaatcgacatcggaggcggacatatcgatcagcaggacgtcgcgggcgcgaaattccgataccccgttgacgttgacaattacccggcggaaccgccgccagcgttcaacgccgatcacgttggcgcagtagcgctcacgcagctttaaatcatccagccgctgaccgatcatcggcgaacccgggcggatggccagccggcgagcgcggccggtgaggtgatattcgcggatcaaatcgcggaaggtgcttctttttcgcccatcgcgtgcggagtcgccattatccgtcttcagcataaagcgcaccgccagcatatagacgatgcccaggatcagcaccaccaggccaatcggcgtgacgctgaaaaagctgaagccgtgcagtccctcgcgcagcaattcactgttgaccaccaggttgggcggcgtcgccaccagggtcatcatcccgctgataagcccggcgaagctcagcggcatcatcagccgcgatggcgaggtattcatccgcgccgagacgctaagtaccaccgggatgaaaatggcgaccaccccggtggagctcataaacgcgcccagaccggcgacggtgagcatcaggtagatcagcattttggtttcgctgttccccgccacgctcaccagccatgcccccattttggtggcgactccggtgcgcaccaggccatcgccgataataaacagggcggcaatcaggatcacgttaggatcgctgaatccggaaaaagcttcatttaacgtcagcgttccgctgaggacaaaggcgacaatgaccatcagggcgatagcatccatgcgcaccttgccggtagcaaacagcacaaccgcgatggccaggagggataaaacccaaatcaattcaccgttcacaacgtttccttgtcacaagtgggagtcgacatagtggcataaaaaagccccgacgacgcggggcgaaatcatgggtttacgctttaagacgcacatttaccacgccgtcagtctggcgttcaaccaccagatcttccaggctgctcagcacgaggtcggcttcatccaggcgaggggcatcggcgggcacgttgaccgcgatagtgcgacagccggccgccagtccggagaggagccccgccggcgcatcttccaccaccgcgcactccccggcaggcagacccagccgctcggcgcccagcagataggcgtccggcgccggtttgccgtgtttcacctgctcggcggtgacgaacacctcaggcatcggcaggcccgccgcgcggtgacgcgcgtgggcaaccggaatcgagccggaggtgacaatcgcccacgggatcccggcctcattgagcgtattcagcagggctaatgcccccggcagcgcgacgataccctcaatatcagtggcttctatctgctcgaggtagcgaaattcggcctggatatcctcctcgctgcgccccggcataaaatggcgaatggaggtaatggcctgcttgccgtgaataaaactgagaatttcatcatggtcaatggcgaaacgatccccccacttgcaccatgaacgctccaccaccggcaaggaatccaccagcgtcccgtctaaatcgaacaggaaacctttacactgcacgggcacctccctcaggcgttgataatttgattaatttcattactgctcagatgatactggcgcgggcaagcgtgccagacgctcagcatccgctgatatttctcccacatcggggtctgcgagttaaagccatgggtaccggcgtcaaaatggctgtagcggccttcaacgttgaccataaaacgcacatagccgagataacgcgcttcggtggcggcatcaaatccgaggaaggtgacccggcgttcatcgatacccgccgcgtctttcaggttggtccaggagacgtgcagcgcgtggtacatctccatgatatcaataacggtacggcaggtttcttccgtcaactggccaaactcgcggtccagttcacgcatctgtagcccctacccacgctctatgatggtttgcagacgacggtagcgttccgcattatccgggtcgagcatcgtcatcattttgtactgattggataaaatcagacgctgcgcattggtcatttccatgttgtgactcctgtagcacggtagggcgtgaaataaagaaggcgcataaatcatgcgccttcttttatatgcgttttccgtagtgaattacaaatcatcaaggaaagttttatccagttgtttgaaggcgcgcttaagcgtgtcagccagcgcctgataatcgggcttgccttcgaccggtgccagcgcctgccccgcctcctgcagtttaccgcgcacttcatagaaccagttaagaatggagggcggcagcggcgtcaccgaacgcttacccaaccaccagagtccctgcatcggcaggctcagcgcaaacagcgcggtagcgacggcggggcccagctggccgccaagagctatctgccagcagagggtaaaaatggcgattggcggcatgatgcggatggcatagcgggtggcacgaataatgcggttttcaataaacaccggcgcgaggcgcttgtcgagaggccaagtctttgcgtaatgctgcccgcggttgaacaagctaaagaagctaacggggcgtttctcaggggtcgacatggctttacctcaactttacatataaaacttaaaaaattcgtgcaaaacaccaactatgcatgacatcgttcaaaagattttggcaaaggatgccgcaatcaggtatcctgtgcccgcctgaaagggcggttagactctttgccaggctagtcaaattatcgcatattctgccattggctgaaaattatgcaaaatggcataaaatcaaatgtacttctctcatcgtgcccgaaaacagaacaaggcatgatgttaatcataaatgtcgaggtcatcctgcgctacgctaatgacacactgacgtttttttagccacgtatcataaaaaggtacttccatgtcgagtaagttagtactggttctgaactgcggtagctcctctctgaaatttgctatccttgacgccgtgaacggcgacgaatatctgtccggtttagcggaatgcttccacctgccggaagcccgtatcaaatggaaaatggacggcagcaaacaagaagccgagttaggcgcgggcgccgcgcacagtgaagcgctgaactttatcgttaacactattctggcacaaaaaccagaactgtctgctcagctgaccgcaatcggccaccgtatcgtacacggcggtgaaaaatacaccagctccgtggtgatcgacgagtccgtaattcagggtattaaagacgccgcgtctttcgcaccgctgcacaacccggcacacctgatcggcatcgctgaagcgctgaaatccttcccgcacctgaaagacaaaaacgtggctgtattcgatacggcgttccatcagaccatgccggaagaatcctatctctacgccctgccgtacagcctgtacaaagagcacggcgttcgtcgttacggcgcgcacggcaccagccacttctacgtgactcaggaagccgctaagatcctcaacaagccggtggaagagctgaacatcatcacctgccacctcggcaacggtggttctgtttccgctatccgtaacggtaaatgcgttgacacctccatgggtctgaccccgctggaaggcctggtgatgggtacccgctccggtgacatcgatccggccatcatcttccatctgcacgacaccctgggcatgagcgttgacgcgatcaacaaaatgctgaccaaagagtccggcctgctgggtctgaccgaagtcaccagcgactgccgctacgtggaagacaactatcaggaaaaagccgacgctaaacgcgcaatggacgtttactgccaccgcctggcgaaatacatcggttcctacaccgcgctgatggacggccgtcttgacgccgttattttcaccggtggtatcggtgaaaacgccgcgatggtgcgtgagctgtcgctgggcaaactgggcgtactgggctttgaagttgaccatgagcgtaaccttgctgcccgcttcggcaagtctggcttcatcaacaaagaaggcacccgtcctgccgtggttatcccgaccaacgaagagctggtcatcgcgcaagacgccagccgtctgaccgcataattccacatcgccagccctgacccgcaataattcgagctgcaggaaggcggcgacacagcaaaaccccggccgcgtacagcgcgtacgccaccggggtgagcaagtagagccaacgcacgtgcaacttgaaatatgacggatagctggcggtgctgttttgtatcccgcctgatactggcggtaacgaaagaggatataccgtgtcccgtactatcatgttaattcctaccggtaccagcgtaggtctgaccagcgtcagcctcggtgtgatccgcgctatggaacgcaaaggcgttcgtctgagcgtctttaaacctatcgcccagccgcgttccggtggcgatgccccagaccagaccaccaccatcgttcgcgccagctcctccaccaccaccgccgctgaaccgctgaagatgagccatgttgagtctctgctctccagcaatcagaaagatgtgctgatggaagagatcattgccaactaccacgcgaatactcaggacgcggaagtggtgctggtggaaggcctggtaccgacccgtaagcatcagttcgcccaggcgctgaactttgaaatcgccaaaacgctgaacgctgaaatcgtcttcgtgatgtctcagggcaccgacacgccagaacagctgaacgagcgtatcgaactgacccgtaacagctttggcggcgccaaaaataccagcatcaccggcgttatcgtcaacaaactgaatgcccctgtcgacgatcagggccgtacccgtcctgacctgtcggaaattttcgacgactcgtcgaaagcaaaaatcgtgaagattgacccggctcagctgcagaaaggcagcacgctgccggtgctgggcgcagtgccatggagcttcgatctgatcgcgacccgcgcgatcgacatggctcatcatctgaatgcgaccatcattaacgaaggcgatatcaatacccgccgcgtgaaatccgtgactttctgcgcgcgcagcatcccgcacatgctggaacacttccgccctggttctctgctggttacctccgcagaccgtcctgacgtgctggttgcggcctgcctggcggcaatgaacggcgtggaaatcggtgccattctgctgaccggcggctatgaaatggacgcgcgcatcagcaagctgtgtgaacgcgctttcgcgaccggcctgccggtattcatggtcaacaccaacacctggcagacctccctgagcctgcagagctttaacctcgaagtaccggttgacgatcacgagcgtatcgagaaagttcaggaatacgtggccaactacatcaacgccgactggatcgaatcgctgaccgcgacctccgagcgcagccgccgtctctctccgccagccttccgctaccagctgaccgagctggcgcgcaaagccggcaaacgtgtcgttctgccggaaggcgacgaaccgcgtaccgtgaaagcggcggcgatttgcgccgaacgcgggatcgccacctgcgtcctgctgggtaacccggatgagatcaaccgcgtagccgcggcccagggcgtggagcttggcgccggcattgaaatcgtcgatccggaagtggttcgcgaaagctatgtgggtcgcctggtcgaactgcgtaagaacaaaggcatgaccgaagcggtcgcgcgtgagcagctggaagacaacgtggttctcggcaccctgatgctggaacaggacgaagtcgacggtctggtatccggcgcggttcacaccactgccaacaccattcgtccgccgctgcagctgatcaaaaccgcgccgggcagctcgctggtctcctccgtgttcttcatgctgctgccggaacaggtttacgtttacggcgactgcgcgatcaacccggacccgaccgccgatcagctggcggaaatcgctattcagtccgctgaatccgcgattgccttcggcatcgaaccgcgcgtggcgatgctctcctactccaccggtacctccggcgcgggtagcgatgtcgagaaagtccgcgaagcgacccgtctggcgcaggaaaaacgtcctgacctgatgatcgacggcccgctgcagtatgacgccgcggtgatggctgacgtagcgaagtccaaagcgccgaactcaccggtagctggccgcgcgaccgtgttcatcttcccggatctgaacaccggtaacaccacgtacaaagcggtacagcgctctgccgacctgatctccatcgggccgatgctgcagggtatgcgcaagccggtcaacgacctgtcccgtggcgcgctggtagacgatatcgtctataccatcgcactgaccgcgatccaatcggctcagcagcagaagtaatctgccgctgtagtcaaagcaaaaggcagccgaatggctgcctttttgtcgtcaggaggcgagcgacgattgctgccgcgcgtttgcgatctttattcgcgctcgctctcttccgcatcatcatactcattaccggcgttgcgggtcatccacagcgccagcgctttcagggagtccggcgtgaactcatcgcagcgggcggtgatctcttccggcgttaaccagcacacctcgctgacctcttcttcctgcagggcgaacggcccgtgggagacgcagctgaacagacttccccagacgcggcagaatttgtcttcgtaataaaactggccgtgatcggcaaacggcaccccggcgatgcctaactcctcttccgcctcgcgacgggccgattccagcagctgctcatcagcctgcacgacgccgccagcggtggcatccagcatgcccggatgaaagtcttttgtctcggtgcgtcgctgcaccagaattttccccattccgtcatgaacgacgatataggtcgcccggtggcgcaggcactgcgcgcgcatttgctcgcggctggactgtgctatcacctcattgttttcattaacaatatcgacccattctgtgcttgccaaatgattctgttccgccatcaggaaaccttactttaaatgcgctctcgcggcgcgtctttatgattgagggctaaattacgggtaaattgcaacctctgcaataacctgattatcattgagtgctaaaacctgcagccgcccctgatccagcagcccatagctggcggaatatccccctttcgggatactcactgagccgggattaaagaggtaaattgcgccgcgtttttccgcgaccggtatatgagtatggccatatgccaggacatcgccagcggccagcggcggcagattatccggactatagagatgcccgtgggtcagaaacaggcgatagcgttcgctaagcacctgctgccagggcgcggtgattggaaaacgaagcagcatctgatccacttcgctgtcgcagttgccgcgaacggcaacaatgcgttccgccacgctgttcaaccgctccgccacctcacccggcgcatacccctcaggcagcgcgttgcgcggaccgtgattgagcacatcgccgagtatgatcagccacctggcgccgctttgcgcgaaccgttcaagcacgcgttccgtggcgggcagcgaaccatgaatatcggaggcaaacatcagcttcataggttccatctccactggttacgatgcctctatgatagcggaagcgcggcgggttatcagcctcagcgtttggcggaaagcgccacgtaacgctggattgaggcccgctgccactggaaagacgcataatcagccagcgcctccggtaccttatcgccattgagaaccaggcgattgagcatcagcgccaggtctgcgtcggcaatagaccattcgccaaataaattttgcccgccgtgggccagtagcatggtggcggtggcaaacagcttttccgcagattgcctgccggcctcgctgaggtccggcattttcgccccgccaaacaccacggcggtggatcgctcttcacgaattggcatcagatcgctgcgcagccaggcctggatctgccgggcgcgggctcgtttttgcagatcatgcgggtagatgcgctcccactccggcggcgcgaaacgctcatccagatactcggtaatcgccgaagactcacttagcgcgaaatcatcaacctccagcagcggtacgcgacgggtggcggcatagcctgtccagcccgcctgcagatgttcgccgcggttcaggtcgacggttttaagggtaaaaggcaggcttttttcctgcagagcgacatagacagacatcacgtacggtgagaaaaaatcggcatcggaccacagggtaatgacaggctggctcatagcttcctcaagggtggtagacaggacaataagccaacatagcctgtcttacaggcgatgtcactgctcgagcgcggacgactcgtcgcctggctgccgggtcgcttgcggaatttctcccgggtggcgcagcttcacctatactcgaacagtttgcgacccacgacggcgggaaatattatgatcgatctttactatgcacccaccccaaacggccacaaaatcaccctgttcctcgaagaggcggagctagcctatcggctaattcgggtcgatatcggcaaaggggaacaatttcatccgcagtttctggcgatttcgccgaataataaagttccggctatcgtcgaccacatgcctgctgacggcggggcgccgttgagcgttttcgagtccggcgccatcctgctctatctggcggaaaaaagcggtaagctgctgagcggcgagctgcgggaacgctacgtcacgctgcagtggctgttctggcaggtcggcgggctggggccgatactggggcaaaatcaacatttttcccactccgcgccgcaaaccgtgccctacgctattgaacgttttcaggtggaaacccaacgactgtatggggtgctaaatcagcgtctgggatgcagcccgtggcttggcggcgaccactacagtatcgccgacatcgccgcctggccctgggtgaactgccatgtccgacagcgtatcgatctggcgaactatccggcggtgcacaactggtatgagcgcattaagcagcggccggcaacggcggaagcgatgttaaaaattcagctttattaaccccctgctcgcccgtcgcgctttgttgtatgattgcaggacttacaccacggaggaagcctgcaatgtctcaaccagacgccattattcgtattaagaacctgcgcctgcggacttttattggtattaaagaggaagagatcgccaaccgccaggacgtggtagtgaatgtagccattcactaccctgccgataaagcgcgcgacagcgaggacatcaatgatgcgctgaactaccgcaccattaccaagcgtataatcagccatcttgagaatggccgtttttcgctgctggaaaaattaactcaggatgtgctgaatatcgcatgcgaacatcactgggtcacatatgctgaagtggagattgataaacttcatgcgctgcgctatgccgactcggtgtccatgaccatgagctggcgtcgctaaccatgtcagggaggtggtatgaagatcctgcttactggtggtaccggcctgattggccgacatctgatacccagattgctggagctcgggcatagcgtcacggtctccacgcgacatccggataccgcccgcgcccgtctcgatccgcgcgtcaccctgtggcgcgatttcgagggccatcaccacctcaatgacattgatgccgtcatcaatctggcgggtgaacccatcgctgataaacgctggacggccgagcagaaacaacgcttgtgccatagccgctgggatctcacgcagcggctggtgggcctgatccacgccagcgacacccctccctccgtgctgatcagcgggtctgccatcggctactatggcgacctcggcgaggtggtggtgaccgaagaagagccaccgcacaatgagtttacccataagctgtgcgcccgctgggaacaaattgcctgcgaagcgcaaagcgagcgcacccgcgtctgcctgctgcgcaccggcgtggtactggctccgcggggcggtattctcggcaaaatgacacccgcctttaagctcggcctcggcgggcctatcggcaacggcagacagtacctggcctggatccatatcgacgatatggttaacggcattctgtggctgctggataacgatctgcgcggtccgttcaatatggtttctccctacccggtgcataacgagcagttcgcccatgcgctgggtcatgcgctccatcgaccggcgattttccgcgttcccgccgccgctatccgcctgttgatgggggaatccgccgtcctggtgcttggcggccagcgcgcgctgccaaagcgtctggaggccgccggctttgccttccgctggtacgatctggacgaagcgctaaaggatgtgctgagttaatggctgacacaggggagcattggctcctctgattccattctgctggctcatgctccacgcctggatggcctccccctggcgctgcagcatcgccatattcaggacaaccagcgcccttaatcgcctgaattcaccgccagccggccggttcgccggtgttacctggcaaagcaaagtgctaaggtaggcttttctttctgcgtattgactgctttatgacgaccatcaccacaccacgcctttcgcttacccgctttgttaccgatgactggcccttttttctgcgcctgcgccaggatccgcaggtgatgcgttttatgggggaggtgttaagcgaggaggcgctgcgcagcgtcttcgtcagtcgctgtgccgatcccggggtgtttgtattgcgcgataaattcggcgaggcgctgggcgatattgggctccgcatcagtccgaaaaatccgcacgaagctgacgtcggctacgcgctgctgcctcaggctcagggaaaaggctatgccagcgaagcgctgcgggcggtctgcgagtatggtttcaccaccctgggggtgcaggccatcaatgcctgggtgctgggtgaaaaccgtggctcatcgcgcctgctggagaagcaaggctttgtgcgcacccaggtgctggagaaagcctatcatctgaacggcgtcgattacgatgactggatctatcggctggagcgggaagctcatccggcgtccgcagacgccggatgagccgattatttcagcgaacctttcagaaactgctgcaggcgcgggcttttcggcgcgccaaacagcgcatccggatgcccttcttcttcaattttaccctgatgcagaaaaatgacatgtgaagagacgtggcgggcaaagcccatttcatgggtcaccaccaccatggtttttccctcttccgccagctgctgcataatgcgtaacacttcgcccaccagttccggatccagcgcggaggtcggctcatcaaacagcagcacttccggttccatcgccagcgcgcgggcaatagagacacgctgctgctggccaccggaaagatgcaccggatacttcgcctgctgacgttcgtctatcccgaccttggccagatattttaccgcccgttcgcgcgcttcctgtttgcttaagcccagcacctgaatcggtgcttccatgacgttctccagcaccgtcatatggctccacagattgaaatgctgaaacaccatggtcaaccgggtgcgcagcaggcgcaactggttcttgtcggccaccttcagctggccgtctttatcccgtaccagaccaatattttggccgctgacgacgatcgtgccttcgctcggtttttcaaggaagttaatacagcgcaaaaaggtactttttccggaacccgatgaaccgatgatgctgataacgtccccggctttcgcctgcagcgagacgcccttcagcacctcgtgttccccatagcgtttatgcagatcgataacgtttaatttattgtcggacatggcgttctcaatgcgtcgaagaaggtttgatatgctgcaaccagcgcttttccgctttacggaacaagctaatcagcacatacgagataattaaataaagcaccgcggcgatgccaaacgcggtgaacggctgataggtggccgagttgatatcgcgggcgattttcagcagatccggtaccgtagcggtaaacgccagcgcggtagagtgcagcatgaggatcacttcgttactgtaggccggcagtgcaatccgcagcgcggaaggcagaataatgcagcgatacagtttgactgacgagaagccgtaggcccgcgccgcttcaatttctccggcgggtactgagcggatcgcgccggcgaaaatttcagtggtataggcgcaggtattcagggttaacgccagtaccgtgcagtttagcccgctgcggaaaaaagcgttcaacagctccgtgcctttgacgatttccagggtatacatgccggagtaaaaaaccagcagttgcacatacagcggcgtgccgcgaaatatgtaagtgaacagccagatggggaactggataaacttattgctcgagacgcggccgatagccagaaacaccgccaggatgccccccattaccactgaagagatcagcaaccataaggtaatcgccacgccggtaaagcgatagccgtcggtccacagtagtgacttccagtactcctgaataatttcaatcacaggtcagccctcttcacgccaacggtatagcggcgttcgagcagcagcagtacgccattagaaacggtggtaaacaccagataaatcaggccgcagacgatggcgaagtagaacggctgccaggtgcttttcccggccagctgcgtggctttgaccacatcctccagccccagcaacgagaccagcgccgtcgccttgaggataacctgccagttgttgcctatccccggcagcgcgtagcgcatcatcgccgggaagagaatacgccggaacgtctgcccgccgctaaagccaaaggcggtagccgcttcgatatgccccttcggcaccgccaggtaggcgccgcggaaggtttccgtaaaataggcgccatagataaagccaagggtaataatcccggcgatcatcggatcgatatcaaactgggccatacccagcgcgtcggtaacgctgtttagcgcaatctgcaggccgtagaaaatcagcagcatcagcaccagatcgggcacgccgcggataagagtggtatagccttcaaataccagcgccagtggacggttgctcgataactttgcgccagcgcccgccagcccaatcaggacggcgagaacgaccgagctgagcgcaagctccagggtgacgagcgcaccctgcaaaataacctgtgaaaacccatacagcatgctgcctaccctgtctgtcattcaccattgcgcgcgaaacgcacgcaatggcgaggcgtgagaattattcgccgtatacgttaaaatcgaaatattttttcgccagcttgtcgtaggtgccgtccttacgcatctctgcaaacgccttattcagcgcttcacgcagttcgttgtcttccttacgcagccccataccggtgccaacaccaaacagtttctcgtctttgattgacgggccgccaaactggtaatctttaccaataggctgtttcaggaacccttcgctggccgcgacctcatcctggaacgcggcgtcgatccggccggcggtcaggtcggaatagatattgtcctgcccctgataggagacaatttcgatacctttcggcgcccagtgctcattgccataggtttcctgagtcgtcccctgcagcacgcccacgcgcttacccttgagggtggcgagatccggcgttaccgggctgccctttttcaccaccagacgcgaatctgccgcatacagcttgtcagtgaaggcaatttcctgctggcgcttttcagtaatcgacagcgaagacataatcgcgtcgattttcttcgcttttaaggaggggatcagcgcatccagcgggttttcaacaaaggtacattgcgtattaatacgcttacacagctcttttgccagatcgatatcaaaaccgaccaattctccctgcgcattcttcgattcgaagggagcataagtcggatcggtaccgatacgaattttttgcgggatggcggcaaagaccgtggaaacgctggaaagggccagcgctaaagagagagacaacgccagttttttcataactatcctcgacagactgtcattctaacgggtttattagaactatttacgccagttatcgtgccattattcgccccttaagggcaaagatttatgcaccagaaaggccgattttttgcatcagaaacgcttaactatgcattttttagccaaaaaactggctgcttttgcactgaaatgatccatagcgcgtttagatgcacccttttggggcatggatacgaacctggcggcaggcccaccccattgtgcgggcctgcagcagtcttagtcgccgtacacgttaaaatcgaagtatttcttcgccattttgtcgtaggtgccgtctttacgcatttcgcccagcgctttatcaaacgcggctttcagctcggcgtcgtccttacgcaggccgataccggtgccgtcgccaaagtactttttgtctttaacggacgggccggcgaaggcgaaatctttcccggcaggctgtttcaggaagccttcgctggcggcgacttcatcctgcagcgccgcatccagacggccagctgcgaggtctgaatagatcagatcctggttctggtaagccaccacgtcaacgccctggctgcgccagcggtcgttagcataggcttcctgagtagaaccctgcagcacgccgacgtgcttgcctttcagcgcctccagcgtcggctggatcggcgaccctttggcggcgatcagacgcgagtcagcggcatatagcttgtcagagaaggcgatctcttgctggcgcttctcggtaatagagagggaagagatgatggcgtcaatcttcttcgccttcagggaggggatcagggagtcaaaatcgctgccgacccaggtacatttcaccttaattcgggagcacaactcattgcctaaatcgatatcaaagccaacaaagtcccctttcgcgtctttcgacgaaaatggcgcataggtcgcgtcagtgccaatgcgaatgctctgcggcagagcagcaaacacgctggccgtgctgctcattcccacgagtaaagagagagccagaatcgtcttcttcatacagtacccttaagtgtcgtgatgtggtgcgttgcttgttatggtgattgccgatcaatcctgcagtttttgtgccatcttcccggtgcgtgccgggaacagggttaaatttgttaaaataaagttgcaggattgtcttaaaagggaagataccagcattactggcgaaaccgcagcgcctgagcgcaaaaagacgaaataaatgtcgaggatttgatcgcggcaacaaatttgcaccaccgcagcgcaagcgtacatttcatgcaccactatagtgcgacactaggccccctgccagcgggtaaacaagtcgtgctccagactaatatcaaattgatcgagtacccgattgacggtctggttgatgacatcgtccaggctttgtggccggtggtaaaaagccggtaccggcggcattatcaccgcccccagctctgcagcctgaaccagcagacgcagatggcccaaatggaacggcgtttcccgcacgcagagcaccagcggacgacgctctttcagcacgacatccgccgcccgggtcagcaggccatccgtatagctatggacaatgcccgagagcgtcttcattgagcagggtaaaatcaccatcccggcggttttaaacgaaccggaagagatactggcggcgatatcgcgggcgtcatgcaccacatcggctagcgcctgcacctcacgtacggagtagtcggtctccatggccaacgtctggcgcgccgcctggctgaggatgagatgagtttcaatatccggcacatctcttagcacctgcagcatccgcacgccgtaaatggcgccgctggcgccggaaatgccaataatcagtcgtttcacgttctgttaccccttgcgcgtgtgccgcagactttgccggattatagcctctggcgcaactattgacgcacagttgaggggcgaaaaaaagcccgccgtcctttaggtacggcaggcccgcgacgcgtgaacggcttaaccctcgttgtgcatctcgaggttttcgacttcgttttgcagctggaccgctttggcatcatcgttacgcagggagtcaagatagtcgaggtactgctggtcgacatcccgggtcacatatacgccgttgaacaccgagcattcaaactgctgaatatccgggttctccgcgcgcaccgcgtcgatcagatcgttgagatcctggaaaatcaggccgtcggcgccaatgatctggcggatctcatccacttcgcggccatgggcgatcagttcgttggcggtcggcatatcgataccgtacacgttcgggaaacgaatttccggcgcagcggaggcgagatacacttttttcgcccctgcttcacgcgccatctcaatgatctgctccgaggtggtgccgcgtacaatggaatcatcgaccagcagcacgttcttatcgcggaattccgcacggttggcgttgagcttacggcgaacagatttacgacgcagctgctgaccgggcatgataaacgtccggccgacgtagcggttcttcacgaagccctgacgataaggtttgtcgagaatgcgggcgatttccagtgcgatgtcgcaggaagtctccgggatcggaataacgacgtcaatatccagatcttcccactcgcgggcaatcttttcgcccagcttagtccccatgttgacgcgggcgctgtagacggaaattttgtcaataaacgagtccggacgggcaaaatagacgtactcgaacaggcacgggttgctgaccggattatcggcacactgacgggtatagagctggcccttctcggtaatatagaccgcttcgcccggcgccacatcgcgcaggaattcaaaaccaagcgtatcaagggccacgctctccgaggccaccatatactcggtgcgaccgtcgccaacgtcacgtttacccagcaccagcggacgaatgccgttagggtcgcggaaggccaccatgccatgcccgatgatcatcgccacgcacgcgtacgcgccgcggatcaggcggttggtcgccgcaatcgccgcgaagatgttgtccgcttccagcgggtagtgacggaagttatccagctcactggcgaaaatattgaggaggatttcggaatcagaggtggtattgatatggcggcgtttttcttcaaacagctttttacgcagctcgtgcgcattggtcaggttgccgttatgcgccaatgtgatgccatacggcgagttaacgtaaaacggctgcgcctcggaggcgctggagctgcccgccgtaggataacgcacgtggccaatacccatattgccctgcatacgctgcatgtggcgggcctcgaatacgtcgcttaccagcccgttagccttacgcaaccggaagcagttgttggcatcaatggtgatgatgccagcggcatcctgtccacggtgctggagcaccgttagcgcatcataaatcgactggttaaccggcataacaccggcgataccgacaataccgcacatacgtcttttcctcgttcagcaacgacccaaagtctatactttaggcaagaaacttgacgagctttgcaggtattcaaaaaaccatctgatgacgggggtaaaatagggaataaactgcgactgatgccagtcatcgctcttcgccatcccggtaaaggtgtccaggaagaacaggatagcggcgatgatcagcaccccacgtagcgcgccgaagcagatccccaataccctgtcggttcctgacaaaccggtcttctccaccagctggcctatcacatagttcacgatagcgccaacgatgagcgtcacgataaacagcgccgcaatagcaatcccatttcgaacccgttcatcctcaaagcccgtaaaccagacagacaggtcagcgtagtaatggctggcgacataaaacgcgcaaccccacgtgactaacgataaagcttcgcgaacaaagccgcggatcaggctgaccaggcaagaaagacccagcaccgccataatggcgtaatcaatccagaccatatacgtcccacgatttacgccctgtcgtccagttcggggcgcattctaacagaaaaagaaaacgtttgcgtagggatttccatgccctacagaaataaaaatggcgctgaaaaaacattcaacgccagactgcctttcgcctcttcagggcggctgagacagggtttgcggggcgtttctccccgccacgttctctccgcatggcggaaaaaacaatcagttcggggtgaagcccatcaccaccccgctaagcccggagatctgctgcagatcgcccagctggcctttcagcttgtcttttgacgcatccgggccgacgaggatgcgggtaattttaccctgtaccggcgtcgaaggcgacgtatagactttgaaacccgaggcccgcagtttaccgacaatctcattcaccttatcggcgttcttcaacgcgcccagctgaaccacataggctttgccggtcggcgccggcagggccgcctgctgctgcggtggctgttgctgctgtggcttagccggcggcggcgttggcgtcgaggcctgctgttgcggctgcggtttcggctgcggcttgggctgcggtttcgcggccaccaccggctcctgaacgtcatcgaagctgttgctgttcaccggaatacgcgatggatctaacgatggcgcggcggcatcgcccgcccgcacctcttccgccgccccttccggcggttgcgaaggcaacgcctgggttgccgccggcaacatatccggttcatcgcgatcgcctggtttcggtaccagcgggatcgcggcaaactcatcctggtaatgctttttctgcccgtccagcagccctggcaggataatcacccccagcgccaccagcacgattgtcccgactaaacggttctgaaacttactcgccaccgattctccccgcgtctatctcttccataacctgcgctacggtgtgaaacgaaccacacaccagcacggtatcttccactttagcgtcagccatggccgcacgccacgcctgcgccacgctgctatagactgtaccgcagcgcaaatgttccaccagctgctctgccgtcgcgccgcgcgggccttccagcggcgcgcagtaccaggcatcgacttccggggccagattggccaacgtgccggcgatatccttatcatgcagcataccaataaccgccagcacgcgtcccgttttcgctaacgttttgagacgcccggcgagataggccgccgcgtgcgggttgtgcgccacatcgaggatcactcgcggggcgtcgctaattatctgaaagcgtcccgggagcatcgcatcgcggatccctgcgcgcaggatagcgtcatccacggcaagcccgctggcgcgcagcgccgccacggccgtcgccgcattcggcaacggcacctgaggcagaggcaggtggcttaacgcccctgccgtatcgcggaaggaccacttttcgccttccacctcatagcgccagtcgacgccgcggcgctggagcagcgcgcccttctcgctagccacttccgcgatggtgagcggcatatccggctcccccaccaccgccggtttaccggcgcgaaagatgcccgctttttcccggccgatactttcgcgatccggccccagccagtcggtatgatcgagggcgatgctggtgaccactgcgacgtcggcatcaacgatgttggtagcgtcgagacgcccgccgagcccgacctcaaggatcaccacatccagctgcgcctgcttaaacagccacagcgccgagagcgtgccgtattcaaaataggtcagcgagatgtcaccccgcgccgcttcgatttcagcaaacgaagccgtatgcgccgcctccggcagttcagccccctgaatgcgcacgcgttcggtgtagcgcaccagatgcggagagctgtagacccccactttataaccggccgccatcaggatggtttccagcgtgcggcaggtggtgcctttgccattggtgcccgcgacggtaaaaacgaacggcgccggtttaacgatatccatctgcccggcgacctcgctgacgcgcgccagcccaaggtcgatggttttattgtgcagatgttccagataagaaagccacgtagccaggggcgacgtggcctgaggaataggatctttttccatgatgcccgtaagaattgacggttaacgcgtatgaataaaaaagggcagcgccgccaggccctgccctctgctttatcaggcctcaggttcctgatccggtgccggcggcaccaccacgccttcatgaggcgcttccgaaacggcaaccggcgccggcaggttcatcagcttcgccagaatgctggccagcttgagacgcatttccggacggcgaacgatcatatcgatcgcccctttttcaatcagaaactcactgcgctggaatcccggcggcagcttctcgcgtacggtctgctcgataacgcgaggaccggcaaagccgatcagcgctttcggctcggcaatgttcagatcgcctagcatcgcaaagctcgccgatacgccgcccatggtcgggtcggtcagcacggagatgtacggcagtccgcgctcctgcattttcgccagcgccgcggaggttttcgccatctgcatcagcgacatcagcgcttcctgcatacgggcgccaccggaggcggagaagcagatcagcgggcagttatcttccagcgcctgctccaccgcgcgcacaaagcgtgcgccgacgacggaacccatcgagccccccataaaggagaactcaaaggcggcggcaaccaccggcatcgcgtagagcgtacctttcatcaccaccagcgcgtctttctcgcccgtctctttctgagcggacgccaggcggtctttgtatttttttgaatcgcggaacttcagcacatcttttggctcaagttcgctacccagttctaccagagaaccttcatccaacaggctatgcaggcgattacgcgccgacatgcgcatatggtgatcgcacttaggacaaacctccaggttgcgctccagctcggcgcggtagagtacctgaccgcagctgtcgcacttggtccatacaccctcaggaatgctcgccttgcgggtgggagtgatgttgcttttaattcgttcaatccagctcattgataacctttctgcctgaacctggtcgatgccagttttgtcgtaaggggcgcataatgccatttttgcctcttacagaccatgaatgttgcacattaaatcatatcatcccggaacatgggataaaaaagtggtcaaaccgctgcgcgtgacgctctgcaccgccacgcgcaacacaggctaaactacttcgcctgcttcgccgccgcccgcttgtggcgaataatctcaatcacgcccggcaggacggaaagcacgatgatcgccacgatcagcagcttcaggttctcctgcaccaccggcaaatcgccaaacagatagccggcataggtgaacagcagcacccacagcagcgccccaaccacgttataggctgcaaaatgacgataggacatatgccccattcccgccacaaacggcgcgaaggttcggactatcggcacaaagcgcgccaggataatggttttcccgccgtgacgttcgtaaaagctgtgggttttatccagatagctgcgacggaatatctttgagttcggattgctgaacagcttttcgccgaacagccggccaatggtgtagttgaccgcatcgccgacgatggccgcgatgaccatcagcagtaccatcaggtggacattgagatcgttggttggcaaggccgagagcgcgcccgcgacgaacagcagggaatcgcccggcaggaatggcgtcaccaccagcccggtttcgcagaacagaatcaaaaacagaatggcataaacccagacgccatactgggcaaccagttcggcaaggtgcacatcaatatgcaggatgaaatcaattaaaaagtgaatcaagtccatgtttgtctttacccttaatgaccctattagtccgccagaaacagcgggcccattggcagcaccggtaaatcatagtgggccgggtaatccaccgacaccagatacaacccttccgcttttgccgttgccgcagcgagcgtcctgtcttttgctgccagcagttctgccatccagctctccggctggtttccggccccgacctccatcaggctgcctacaatattcctgaccatatgatgtacaaaggcattcgctttgatatccaccaccacatacgcgccgtagcgggtaacgttaatatgcatcacgttgcgccacggggtacgcgactggcactgtaccgcgcgaaacgaggtaaagtcattctctcccagcagacactgcgcggcgcgctgcatacgctcggcgtcgagcggctggtgaaaatgcgtcactccctgacttaacaccgccggacgcaggcgatgattatagatgacgtagcgatagcggcgcgccgtggcgctgaaccgggcgtgaaaatccgccggtacatgtttgacccaacgcaccgcgatgtcaccaggtaaattcgcatttacccccagcgtccaggcggcatctttccgctgcgcccgggtttcgaaatgcaccacctggccggtgccatggacgccggcgtcggtgcggccggcgcaaaagacggtaatcggttcgttcgccacctgcgagagcgccttttccagcttctcctgcacgctgcgcacttcgttttgccgctgccagccgtaatatttgctgccgtcgtactcgatgcccagcgcgattttacagatcggctgttgctccatctcagacatcagtacaggtactcctcaatcagcttctcggcgatcttcaccgccatcagcgcgccgccgaagcgcacgttatccgctaccgaccagaactggatctgctccgccataccgtaatcgttatgcacgcagccgatggagaggcgggcattgccggaggcatcgccaacctgggtcgggaattcgccctcttcagaaagttcgatatcctcgccgcgggtaaaagcgtcgcgcgcctcctccgccgccagcgggcgcatcgcttcgaagctcaccatctgcgcatggccgtagaagaccggcgactgaacgacgctggcggagatcatcagcccgtcatcctgaagaattttgcgcgcttcatcgacgatccggcgctcttcgcgcacgctaccttcacgatccggcagcagcggcagcatgttgaacgccagctggcgaccaaagaaatcgtcttcatcgatagggatgccgttcagcagcttagcgctctgacccgccagcgcatccaccgcttttttcccctgccccgaggcggagagcaggttagtgacgctaatgcgcgacaacccgccctgatcgatcagcggtttgagcgccgtcaacagctgactggtcaggctattaggcaccgcaatcaggttgcggttgcggtaatcgcctaatacgaacgggttcacgtccggcaccaccagcggtacgtccggctccagcgcaaacaggccgctgagatcgataaccagacacccggcgttggtcgcttcttcgacatacgctgcactggcttcgacgccggcggcgaagaaagccagctgggcctgggtccagtcaaattcggcggcgtctttgacgatcaccgacttgccaccaaaacgcagatgttcgcccgcgctgtcgttgcgcgccagagcaaaaatctctcctaccgggaactggcgttcagcaagagtttcgagcagggcttcgcctacggcgcccgttgcgcccagtacggcaatattccagccttcagacatggtggttaactccagaaataaagcggccccgccggagtatccggcaggggcattaagaagacattaacgaacaggatgatgcacggcgttaaaaccgagctggcgcaacagcgtcgccgcctgctcatcgctgcactgcacatacagcgaagaccattcgcgacgttcctgataatttttacgcagcttgtcgaattcaccggcgacgccggccaccttccgcagcggcgcatcatcgcggcgcacatcatacaccaagtggaccagtcttttcagcgtcggctgatcgagcggtccatgcagggtaatgcggccaaattccggcgccggcagcagagtgtccagcgctacctgctgcggatggccgataaaggcgctgtaggcttcaaaaacctgcgtcgtcccgcgcgctttcccttcgagggtgtagccggcgatatgcgcggtaccgatatccactcgcttgagaagctcaacgtttagatccggctccggctcccagacgtccaataccacactcagcggctgaccagcttccagccgctttagcagtgcggcgttatcgaccaccggcccgcggcaggcgttgatcaaaatcgttccaggcttcaggcggcttatcagcgcctcatccgccagatgcagggttttatattgcccttctttatacagcggcgtatggaaggtgatgacatcggcttcctggaccagcgcctcgagggagcggaagtcaccttcgtcgccgcgatcggcgcgcggtgggtcgcagagcagagttttgatccccaacgcttccaggcgcttttgcagtcgcccgccaacgttaccgacgccgacgatcccgacggtgcgatcgcgcagcgcaaagccgtcgcgttcagccagcatcagcagcgatgaaaagacgtactctaccaccgcaatggcgttacagccaggcgccgcagagaaaccaatccccgcctgctgcagccacgcctgatcgacgtgatcggtgccggcggtagcggtgccgacgaacttaatggccttgccggcgagcaatgcttcattgacccgggtgaccgagcgcaccattagggcatccgcatcggtcagggcatcggccgggaccggacggcctgggatcgcctgcacgtcgcctaaacggctaaaaagctcacgggcatagggcatattttcatcaacgaggattttcacagttcagtacctgtctgagaacgagagttaactggggaagtgtgccataatctggccgccaggcatactcatcacctggttccagcaccgcgatatcgaaaggatgaatcatgacgcacccccttgctgatatgccagaccgtcctccagggcgaggcccatcaggcactgccgccaccggcgaaccttcgctttccatgcagcaacgcaccgttctggagcgactgatcacgcgcctggtggcgctgacctcgcagcagaacgcggaagtgtgggcctgcgtcaaacatgacctcggactgaaaggcgactcgcccctgctggcctgccatttcagcgccgcggaggccagtctcaaccagcgcttagccgccgctcaggataatcatcatcatcgccagaccttagcgcagctcagcgatctgctcggtcagggcaataaccgccaggcggtgagcgattatattcgtcagcattatgggcaaacggcgctgcatgcccttagccagacgcagctggagaccattctgcatctgctgcagcatggccagctgtcgatcccgcagccgcagcagcgcccgccgaccctgcgcccgctgttgccagccgagcataatacgctcaatcagctggtgactaagctggcggccgccaccggcgaaccaagcaagctgatttggcaatccatgctggagctttgcggcgtcaagtccggggagctgatcccggcgacgcacttcctgccgctttcgtactggctgcaggcgcggcaaacgctgagtgcgcaaagcgcgccgacgctcacctcgctgcagggagcgctcaagcagccgctggaggccgcggagtggcagacaattgtcgactttgcccgtcgcagctggcaggtcacgccgcggaccacgctgagcccggcgcagatcctggcgctgctgaacaaggtgtttgtgctgcgggtggcccgcgcccaggagacgctggccatcccgcaggaggagcctgtcgccaggcggacgtggagcgctaagccgtggcagctggcgctgggcgcggttgtcctgctccttgtgctgtggctcctgctgtagtccagcagccaccggcggcgtttacggctccccttcatgccaaacgccgcggtgtttcctacagcgttttcaggccggacaataacctagcggcgaaatgagataagggtgacgaggatccccagcgccgcgcagagggcgccggcaaggaacaccgacgagtagcccagcgaggtcgccagcaggccggtcagcggcccggtcaggccataggagatgtcctgaaaggccgcatagccgccgagcgcggtgccgcgcacctgcgccgggacgcgcttcactacttccacgccaagtgaggggaaaataagcgaacagccgcacccggtcagcgccgcaccggccagcgccagccaggcattcgccgccagtcccagcagcgtcagaccaaccgcctctatcagcagcgagaccatcgccaccttaacgccgccaaaccgatccggcatccagccgaacagcactcgcatcagcacaaaggcgccaccaaacgccgtcagggtaaagccggccattggccagctatggctggcgaaatagagggagacaaaggtgccgatcaccgcaaagccgacaccctgcaggcccaggccaatacccgggcgccagatcatgccgatgacgctccagagtgaaggccgctcgcctccgtgggccgccactttgcgcacggtaccgttaataagccaggcgacgagcggtagtcccatggtgacacaggccagcaccgccacgccaaaatggctatagatcaataatcccagcggggcgcccaccgccagcgagccgtacatcgccatgccgttccatgacatcactttgccggaacgggccggtcccaccaggcccatcccccagctcaggtttccggtcagcagctggctttcgccaaacccgaggatcaagcggcccagcagcagcaggccgagcctggcgagcaccggcagcggcagcagcgcagcggccagccatgccgcgcccgccagggcgcaggccagcatcccctgcaggacggaacgtttagcgccgtactggtctgccagacgtccggcgtacccccgggtcagaacggtggcgaggaactggatccctaccgccacgccaaccacggtgttgccaaatcccagctcctgatggacaaagagcgggatcaccggcagcggcaaaccaacggtcatataggtcaaaaagacggcaaacgtaatacggaaaagcgaaaaattcgccgaagaattggatgttgtttcagtaactgcggacatgcattactccagattcgcagagtaaggcgagcaaagcgacacgccccctccacctgattatcagggttaaggcgcgttggttgacgttaaacgcttacgcattagtggagagactaatggatccgcgagcagtgtgcctgcgggctcttaccctgtcaagatgacaaaaaaggggagccggtggctcccctttgcgcatcacatgctgattaggcgttgtatttacgcatcaccagcgtggcgttggtgccgccgaagccgaagctgttggacattacggtggtcagcttagcgtccgtcggtttggtgacgatgttcaggccggcagcctgctcgtcgagctcttcaacgttgatgctcggcgcgataaagccgtgctccagcatcagcagggagtaaatggcttcctgtacgcccgccgcgcccagcgagtggccggtcatcgctttagttgccgaaatagccgggctgttgtcgccgaatacttcgcggatggcgcccagctctttcacgtcgccgaccggagtggaggtaccgtgggagttcagatagtcgatcggcgtatcaacgccatgcatcgccatctgcatgcagcgcactgcgccttcaccagacggggcgaccatgtccgcgccatcggaggtcgcgccatagccgacgatttcggcatagatgtgcgcgccacgcgccagggcgtgttccagctcttccaccacgaccataccgccgccgccggcgataacgaagccgtcacggttagcatcataggtacgggacgctttttccggggtgtcgttgtatttagtggacagcgcgcccatggcgtcgaattcgcaggccatttcccagcacagctcttcgccgccgccggcaaagacgatgtcctgtttgcccagctggatctgctctaccgcgttaccaatacagtgggcggaagtggcgcaggccgagctgatggagtagttaacgccgtgaattttgaacggtgtagcgaggcaggcggaaacgccggaagccatcgctttggtgaccacatacgggcccacggctttcagaccacgcgggctacgcatggcatcggcgccgaagacctggaatttcggggaaccgccgccggagcctgcgatcaggccgacacgcgggttattctgatatgcttcaggcgccagacctgcgtcggcaacagcctgttccatggacaggtaagcatagatggaggcgtcgctcataaagcgcactactttgcggtcaatgaggccagtggtatccagtttgacgttgccccatacgtggctgcgcatccctgaatctttaagctcctgagagaaagtgatccctgaacgtccttcacgcagagatgccaggacttcctgctggttattaccgatgctggaaacgatgcccaagccagtaatcactgcacgtttcattaaatacctctgtaagtcgcactattttaagtttcgtgtcgcacaatagcgtacacttgtacgccgaacaagtccgatcagacattttgtgtataaatttgcgccctcaggcacacatcgttaagatcgtgctacgccttgtgattcgagtaacttacgtgaaacaaaacgccatacaacccgccaacctggaattcaacgctgagggtacacctgtttcccgagatttcgacgatgtttacttttccaatgacaacggtctggaagagactcgctacgtttttctcggcggaaatcgcctgccggagcgcttccccagccaccctcgcccgctgatgatcgtcgcggagagcggcttcggcaccgggctcaatttcctcaccctctggcaggcatttgacgtttttgttcgtgataacccgaacgttaccttgcaaaggttacatttcatcagttttgaaaaatatccgctgaaggctgaggatctccgcctggcgcaccagcgctggccagagctggctccgtgggcgcagcagctgcaggcgcaatggccgtcggccttcggcgggtgccatcgtctgctgctcgacggcgggcgggtgacgctcgatctgtggtttggcgatatcaatgagctgaccagggagctggatgattcgctgaaccagcaggtggacgcctggtttcttgacggctttgccccggcgaaaaatcccgacatgtggactcaggatctgttcagcgccatggcgcgcctggcgcgacccggcgggacgctggccacctttacctccgccggttttgtccgccgtggcctgcaggaggccggctttaccatgcgtaaaagcaaaggcttcggccgcaagcgggagatgctgaccggcgagatggcgcaaacgctgagctttcctgcgcgcgtcccctggttcgctcgcagtagcagcgatgcccgcgaggcggccatcatcggcggcgggatcgccagcgccctgctctccctggcgctgctgcgccgcggctggcaggtgaccctttactgcgccgatgaggctccagcgcagggcgcctccggcaatcgccagggcgcgctgtatccgctgttaagtcagcacgatccggcgctggcacgcttttttccggccgcctttaccttcgcccgccgaatgtatgacgcgctgccggtgatgttcgatcaccaatggtgcggtgttacccagctcggctgggatgagaaaagcacgcataaaatcgcccagatgctggcgctgaatttacccccggacatcgcctgcgcggtgacggcggaacaggttgccgggctgaccggcgtcgataccggctgcggcggcatcacctatccggccggcggctggctgtgcccgcagcagctcaccgccgagctgctggcgctggcggccacgcgcggactgcacgtgcactatggttatcccgtcgaaacgctcagcgcggagggcgatggctggctgctcaatcagcagcgctatcatcaggcggtggttctggcgaacggccaccgcatcactggttttgcgcaaaccgcccaactgccggtctacccggttggcggccaggtcagccatattcccaccaccccgcggcttgccgccctgcgccaggtgctgtgctacgacggctacctgacgccacagaatccgcaaaatcagcagcactgcattggcgccagctaccaccgcgggaataccgacaccaccttcagcgaagaagatcagcagcacaaccggcaacggctgatcgactgcttcccgggcgcggagtggccacaggacgtggatatcagcgccaacgacgctcgctgcggcgtgcgctgcgccacccgcgatcatctaccgatggtcggcaacgtgccggactacgcggcaacattgacgcaatacgccagcctccacgaacaaccggatatcgccgatagcgcgccggtctgtcgtaacctgtttatgcttggcgcgctcgggtcgcgcggactttgcaccgcgccgttaagcgctgagctgctggcggcgcaaatgagcgcggaaccgctgccgctggatagcgacaccctggcggcgctgaatccgaatcggctgtgggtgagaaaactgctgaagggaaaagcggtgaaataaaaccatgagggcaggcaatttcccgggtacggctgacgcctgacccgggctacaacatggctcaggcctgatttttcgcctgttgatacaggttatgccacatcccctgcaccagaatttggtccggcggcgacagttcgccagcgctgatggctttctccaggctctggctaactctgctgtgtaccgcgtcagcagaatgctcgccctcaccttccagctcagccaccgccagcgtcaggtggccgcgcagataaccgccggcaaacagttcatcatcactggcgtggtctaccatgttgtcaatcagcgccagaatgcgtgattcaaactccgcgatcatcatcttacctcttgtcatgtaatgtgcggccttagtgcaggtcttccggccacggaaagtgttccgccgtcaatggcggcgtttgataatagtgttgtaacgcgcgaataaagcgcgccggacgttcggggatcccttgttcaagtaaagtcatcacccgagcatgcacccggcgctggaaggcgatgcgatcgggctcaacgtccccttccagattgtcacagctgacgttaaacggaaatcccgccgccacgcagaacagcaactcaaaggcctgcggtttcacctcgacatcctcaaactggctttgggtcattgcatcgcggccgtccgggcagtaccagtagccaaaatctacttgttcgcgacgcgccttgccggcgacacaccagtgagagatctcgtgcagggcgctggcaaaaaatccgtgcgcaaacacgatacggtgatagggcgtttcatcgtcagccggaaggtagatcggctcatcgtcgcctttaatcaggcgggtattaaattcttcggcaaagcagctgtcgaaaaggtctatcagctgctgataatggtgttgctgttgcattaatgaattcccaaccactgcaaaatctcagccccgtggctgtcataaagaagtttcgcgctcatcaccgccgagacgataacgatcatcggccggatcagcgactgccctttactcagcaccagccgggacccggcgcgggcgccaataaactggccggccatcatcacaaagccggtggcccagataacctttccaccgatgataaacagcagcaggccgccgacgtttgaggtggcgttcagcagcttggcatgggccgtcgacttggcaaggttaaacccggccagagtgacaaaagccagggcgtaaaacgaaccggcgccggggccgaaaaagccatcgtaaaaccctacgctaccgccggcgaccagcgcaaacggcagaccgtaaagccgacgctgccggtcggcttcgcccagtttcggcatcagcaggaaataaaggccgatgccaatcaccagcaacggcaggatctgcttcagaatatcggattgcacgtgctgcaccagcagcgctccggcggttgagccgataaaggtcatcagaatattcagcttctgatcggccagattaaccaccttgcggcggacaaaatagagggtcgccgatagcgacccgccgcaggcctgcagcttattggtcgccagcgcctgggctggcggcatgccggccgccatcagcgcagggacagtcaataagcccccgcctcccgccagtgagtcaataaaaccggccaggatggcgacaaagaagagtaccaccagcaccagcggcgatacggcaaacaactcgataaaactatccattacagcacatgctcatccagtagcgcctggcaggaaggcggcagcggcggcggcgtcttcttcacagggggggtagacccgggtttaggtggttcgaaccagctctgcagctccgctccgcagccatcgccgggcggcggcggcgcctgatcctcgcactccagacttcccgccgggcaacgcagtcggacatgcatatgagcgcgatgctggaaccagggacggactttacgcagccactggcggtcgctgcccgcgtccaggcacagctgctgtttaatcgccgggttgacgaagatgcgggtaacttcgctatcttccgccgccagcttgataagctggctgatttgcgggctccatagcgacggcaccacatgcttgccatcgctggcgaccaggtccagcgcctgcggcttcaacagctgggacgatgtccagcgcgtttgcggcagctgaaggaagatatcgacatcgaggcccgtctggtggctggcgtgcccgccgttaaagcgcccgcccgccggcatccccatgtcgccaatcagcacggttcccattcctttattgtgcacctgattactcaggcgctgaataaactgaaccagatccggatgaccgaagtagcgacgctgatcggtacgcatcacctgatagccgggggcactcagggggagcgcctcggcgccaacgatacagccattggaaaacgcgccgattgactgggcgctgccgccgatcggttgggttattttctgccatggcgtggcggccaggctaccggcgctggccaacagcgcaagcagtgcgataacggtgtttttcatggttaccagcgtggaattgtcgtcgtcacgtcgccattctgcgcgcgctgacgcataaagtgatccatcagaacgatcgccagcatcgcctcagcgatcggtacggcgcggatgccgacgcacggatcgtgacgccctttggtgatcatctccacttcttcgccaaagcgattaatcgtatgaccgggaacggtaatactggaggtaggcttcagcgcgatgttggcaacgatctgctggccgctgctgataccgccaagaatgccgccggcgtggttgctctggaacccggctttagtgatctcatcgcggttttcgctgccgcgcagcttcaccacctcgaagccgtcgccaatttccacccctttcacggcgttgatgctcatcagcgcgtgggcgatatcggcatccaggcggtcgaagaccggctcgccgaggcctggcggtacgccgtcagccaccaccgtcactttcgcgccaatggagtcgccctcttttttcaggccgcgcatcagttcatccagggcgtcgattttatccgggtccggacagaagaaggggttctgctcaacctgatcccagtctttgatggccagcggaatatcgcccatctgcgtcaggcagccgcgaatgacgataccgaacttcgcggcaaggtattttttggcaatcgccccggccgctacgcgcatcgcggtttcgcgcgcagaagaacgaccgccgccgcgatagtcgcgcagaccatacttttgctcgtaggtgtaatcggcgtgtcccggacggaacagatctttgatcgcgccgtaatcctgcgaacgctgatcggtgttctcaatcagcagaccgatactggtcccggtggtaacgccttcgaagacgccggagaggattttgacctgatccggctcgcgacgctgcgtggtataacgcgaggtacccgggcgacgacgatcgaggtcgtgctgcaggtcggcttcggtcagcgggatgcccggcggcacgccgtcaacgatgcagcccagcgccagaccgtgcgattcgccgaaggtagtgacgcgaaagagttgtccaattgtatttcctgccatcacggctccaatctttttcgttatgttggcgtgttgtttttttagtctttataaataccgaagtgcgcacgggcgtcaatcagctgctgtttggtcagcataaagaccccgtcgccgccgttatcaaactcaagccaggtaaacggcacgtccggatactgctccatcagatgtaccatgctgttaccgacttcacaaatcagaatcccgtcgtcgctgagataatccggcgcgttgccgaggatacggcgcgttagcttcaggccgtcgcttccggaggccagccccagcaccggctcatgctcatactcttccggcagatcggccatgtcctcttcatcgacatacggcggattggtgacgatcagatcgtactgcagcttcggcagatcgcggaacaggtcggaacggatcggcgtcacgtgatggatcaggccgtgggactcaacgttgtgctcggcgacggccagcgcgtccggggagatatctaccgcatcgacttccgcctccgggaaggcataggcgcaggcgatggcgatgcagccgctaccggtgcacatatcaaggatgtgctgcggcttatggttaatcagtccggcaaactggttattgatcagttcgccaatcggggagcgcggcaccagcacccgctcatcaacgtaaaactcatggccgcagaaccacgctttgttggtcagataggcgacgggaatacgctcgttcacgcggcgaatcacccgctctacaatgcggtgtttctcgctggaggtcaggcgcgcagtgcgcatgtcttccgggatatccagcggcagatacagtgaaggcagcaccagctgtaccgcctcgtcccacgggttatcagtcccgtgaccgtaccagatattagcagcgctgaaacggcttaccgcccagcgcagcatgtcctgaatggtatgcagctcattgactgcctcatcaacaaaaattttatccacgacatcctccagggcacactctgctataaattcggcggctagtgtgccatgaagacggcgataaatcagcattcttgcgataaggggcgggggaaaaaacaggttttccttgcccgaagggatattgagtcgggtaaactagcgcaaagtatgaatgagagcggacaatgaaaaagaagacatcgcttagcgaggaggatcaggcgctgttccgtcagctgatgaccggcacgcggaagatcaaacaggacactattgttcaccgcccgcagcgcaagaaaattaccgaggttgctcctaagcgtttgctgcaggaacaggtcgataacagccactatttttccgatgagtttcaaccgctactgaataccgaaggctcgacgaaatatgtccgccccgacgtcagccatttcgagctgaaaaagctgcgccgtggagattattcgccggagctgttcctcgatctgcatgggcttacccagcagcaggccaaacaggaactgggcgcgctaattgccgcctgccgccgcgagcatgtgttttgcgcctgcgtgatgcacggacatgggaaacacatcctcaaacagcaaaccccgctgtggctggcgcaacatccgcatattatggcgtttcaccaggcaccaaaagagtacggcggtgacgccgcactgctgatattgattgaggtcgaggagtggcaaccgccggagctgccgtaacggcgggctccggggggccgtcagatggcgttggccatcttgaggttgcaggggcttttctgccagaggaactcacctttgccgtcggcatccagcgtcacgcaggcgatagccgaggtggtgaacatcgggggcgtttcccccggacacagctctgagaccagataccccaccagcggcaggtgggagacaaccagcgccgtcgccacgccttcattcgccagcgcctgcagataggcgctcaccattcccacatcaccgcacggcgtgagctccggcatcacgtcgacatgtttcggcaggttcatgcactccccaacaatatccagcgtctgttctgcacgcagatagggactgacaagaacgcgctcaatatccactttttgacctttcagccaggttgccatctgacgagactcatcacaaccgcatacggttaatggacgaaccgagtcactggctgcatcgagggcagcgtcgccgtgacgcataataaaaacttgcatattgcaccgcttttgttaaccagaagcaccgtagtttggcctgcgaagacaatacgcaggtgacccggtggccgggcattgtgcctgatccattccacgaatgaaacgctgttttttacctcaatggcgtaagtatagtcaatcattgtttacaaaacagccaatcaacagcgtcgtccgcagccggatttaccttctttgaccacaacttaggtcagccgttcatccgctggccaaaaggtggtcccctgttcggccatgcgtaataaagtgtcacagggtgtaaaacgtgggccgaactgggcggccaggcgctgcaggatcgcggcaacttcacccgcgccgatagtatccatataccggaacgggccgccaagaaatggcggaaaccctataccaaagacggcgccgatatcgccatcgcgcgcgctccggataatctgctcatcaaagcagcgcgccgcttcgttaagcatcatcatcacacagcgctccgccacctgctgcgcggagagccgcgactgcgggcggccgatgccgagcagcggatagactgccgggtcgggccgttttttgcttttacgcccttttgtctcataaagatagaaaccacgattattttttctgcctttgcgatcgtccttcaaaatcgcgtcaatgatgtttgcaggcgggctaaaacgttctccaaacgcgctctccagcacagggataattttggtgccggtatcgatacccacctcatccagcagttgaatcggccccaccgggaaaccgaatttaaccaacgcgttatcaatgacttcaatcggttcgccttccaccagcaggcgcatcgcttcattgatatacggcgcgaggatacggttcacatagaaccccgctttatctgcgacaacaatcggcgttttcccctgccgtttagccagctgcaccacggtggcgatagtctgcgggtcggttcccttgtgcgggatcatctcaaccagcggcattttttccaccggactgaaaaaatgcaggccgattacctgccccgggcggctggcgtgagcggcaatatcgccgattggcaacgatgaggtattcgacgcaaagatggtctgcggcccgccgtattgttccacttcgctgaccatccgctgtttgagagccaggtcttcaaataccgcctcgatcaccacatcgcgatgagcaaagccctgatagtcggtagtgccggagatcagcgccatctgacgatcgcgctccactgggcgcagtcgacgctgacgaacctgtttattcagcagatcccagctgtactttaaggcgtggttgatgccacgcggctggatatctttaatccgcaccggcagcccacccttacaggcggtcacataggcgatccccccgcccatcaagccaccgcccagtactgcaacgcttctcagcgaaccggggcccgcctcggcgccagggtcttttttcagatcggtactggcaaagaagatcgatcgcagcgcctgcgactgagggctcatcgccagttcgccaaatgcgcgcgcctcttcagcgtatccgctgctgcagccatgggccagaccattctcgacgacctgcaagattcgcttcaccgccgggtaatttccctgcgttttgcgctgcgtttgtttaccgacaaactggaataacagatggcgccccaggggccctgccagtacgcgttcacgaacaggcacctcccggctggtcggtcgtcccttcagcgccagctccaccgccgcctgcagtaaaatcgcctgcggcaccacctcgtccaccagaccggccttcagcgcctgtcgcggccgcagctgcttgccggtgagcatcatatccagcgcggtgctgaccccgatcagccgcggtaaacgctgcgtcccgccggaacccggcagcaggccaagctgtacctccggcaagccgagtcgggttttttcgtcatcgctacagatacggccatgacaggccagcgccagctccagaccgccgccaaggcaggcgccgtggatagcggcaatcaccgggatcgacaggccatggatctcagccataatctgctgtccctggcgcgccagcgcttccgcctcctgcgcgctgcggcagcgggcaatcatgttgatatcagcgccggcgataaagttatccgctttggcggagataaatactacgccgcgcactgacttatcgtcacgtaactggcgtatcaatccccgtacctgactgccaaattcggctttcagggtattcattttttcacccggggcatcaatggtgatcaccgcgattttgtccgcacggacctcaagcttaaaagcggaaacagtatccattattcagcctccacgatcatcgccgcacccagaccaccagccgcgcaggccgtcaccaaaccaaatcccccgccccgtcgccgcacctcatgcagcgtctgggtgatcatccgcgcgccggtggcggcgaaggggtgaccgtaggcgatagagccgccgaggacgttaaacttgctttcatctacctcaccggtggcctgcgagcggcccagcacctcgcgggcaaagcggtcgcttgccagacactggagattggccagcgtctgcgcggcgaaagcttcgtgcatatcgataagcgtgagatccgccagcgtcaggccagcgcgctccagcgccagcggcgtggaccacgcgggccccagcagcatatcctgccagacgtcgatggcggtaaaggcgtagctgcgcaaatagcccagcggcctcagccccagctctttagcccgcgactcggtcatcaggatcaccgctgccgcgccgtccgtcagcggcgtactgttggcggcggtgacggtgccatgtttgcggtcaaaggccgggcgtaacttctgataatctgcgagcgttgaatttttacgaatattgttgtcctgctcgagcggttcacggaaagggggagcataggcggtcatcacctctgcggacagtttaccctcttcccaggctttcgctgccagctggtgcgaacgatgcgccagggcatcctgttgctcgcgggagatcccccagcttttcgccatctgctcggcggtatcgcccatccgcaatccggttgaatattcagccaccgccggggggaccggcagcaggtcgcgtggccgcagacgggaaaacagcttcagcttttggctcagcgtgcgtgccttattggcatccactagcgtgcgggccagcgttttactgaccccaatgggcaggacagaggaggagtcggcgccgccggcaataccggcgcggatggtgccggccatcaggctttcagcgacgttcgccacggcctggaaactggtggcgcaggcgcggctgacgctataggcgtcggtatgtacgctcatgccggtacccagcacaatttcccgggcgatgttcggcgcttccggcatctgcaccacctggccaaagaccagttgctcgatgacttcggcaggaatgtcgctgcgcgccagcatctcgccaaccaccatttttcctaaatcaatggccggaacgccatgaaaagccgtagcctgacgagcaaatggcgtgcgtagccccgtgacaatggcaatgcgatcgccctgacgggtgataagcggtaatgcctgactcataacactcccctgttaaccaagacaaccaagtggtctgacctgataacattcttaactaattttttacattaagccaatcggagaagcgcaaaattgcgagccaaaacacagtgaaaagaaaaggaaacgccccttatcaggggcgtcgagggggaaggattaacgtaagcccagctggaagatcagggattctgcttcgcagctgaaaacaaaatcgatatccagctgcacaccgccgtcaacgtcagtgaaggttgggttaatttggcacggctcagattcgacattgcgggctttttcgcttaacgcggcgagcgtttgctcggcttcagcgcggttggcgaatacgcggctgtaggaggcggtgcagtcggtgttgtcaacaatcgtgccaacatccatacagcagcaaaccggggtttcatcagcgctacatttactcatcgtagatttcctctggagatgcaccttcggtgccagaaaaatgatgtacctattttacgccctgtccccggtgagcctccagccgagaatcgctctgccggcgttaagtgacagaaatcacacttaaaaatgatctaaaacaaaaatccccttctgtcccccttgctctctccgagatttttgccagctggatcgcgtttctgttatcacaattgaaaaacttcataaacatacttgcaacaaatcatctggtcagacctatactcagcgcactggtctgatttcttggttgtaccgcagaccctacactcccgcgcttctgttacggcatgtaacatagtttaaaaaaaaataactcaatgaggttatgggcatgagccagaaaacccgctttacccaatctgcccttgcagtggctgtcgcacttgtttccacccaggcctggtcagcaggcttccagctcaacgaattctctgcatcggggctgggtcgtgcctattccggtgaaggggcgatcgctgacgatgctggtaatgccagtcgtaacccggcattaattatgatgtttgaccgcccgaccatgtcggcgggcgccgtgtttgtcgacccgggcgttaatgtttcgggcacctctcccaccggcaagagcctgaaagcagacaatatcgccccgacggcgtgggtgcccaacttccactttgtcgcgccgattaacgaccaatttggttggggggcgtctatcacctctaactatggtctggcaacagagtataacgatgattatgcggccggcagcatgggcggtaaaaccgacctgaccaccgcgaacttcaacctgagcggcgcctaccgcctcgacagcaactggagcttcggcttaggctttgacgcggtctacgccaaggcgaagatcgagcgctatgcaggcgatctggggcagattgtcgcaggctctggcgcgctgccgccggcgctggcgggccaggtagcgaagatcccggccgacacgcagatcgcccatcttaatggcaacgcgtggggcttcggctggaatgccgggatcctctatgagctggataagaataaccgctacggtttaacctaccgttctgaggtcaagatcgacttcgacggtaactaccgcagcagcctgccggcggcctataaccagatcctcggcaacttcggcctgccggcgggcaccagcggccagacgacaaatggttcgctaacccttaacctgccggaaatgtgggagctgtccggctataaccgcgtggcgccgcagtgggcggtccactatagcctgacctacaccagctggagtcagttccaggagctgaaagccaccggcagcaacggccagacgctgttctataaagaggaaggcttcaaggacgcctatcgtcttgcgctggggaccacctattattatgacgataactggaccttccgtaccggtatcgccttcgatgacagcccggtgccggctaataaccgctctatctctattccggaccaggatcgcctgtggctgagcgcgggtaccacctacgcgttcaataaagatgcctcggttgacgtcggcgtttcatacatgcacgggcagcatgttgaaattaaggaaggcccgtataccttccgttccgaaggaaccgcctggctgtacggcgctaacttcaactaccgcttctgataagcagcgcgccacaaaaaagggtgaacattatgttcaccctttttttatcattcgccgatcactgtgaatcgatatccttcagctcatcctgaatagcctgagcattcgggttgtccgccggggtcagcttaccgccgttggcgataaagtcatgacgctggaagtaggcttcacgcatcagaatgtaagggtcggaagactggcgcagcaggccgtcggaatccagcagctgagcacgtgtctcaatcccttccaccgcccatttaccgatcgacatcggccaggtcagccaggagagcaccggatacaagccatcggccatatcgccgccttcgtcgcgcaaggtaaagcttccatagaacggcaactgaacatacgggccatagccaacgccataatgcccaagcgtactgccgaaacgatgtggctcaacccgctgtagctgcggattcgccatcccggccacatcgataagcccacccataccgagaatggtgttcaggaagaagcgggtaaaatgcaccatacctttataggggtcgccctgcaggaagtagttcaccatcactgccggctcttccaggttactggtaaaattgcttaacccgttgcgcgccggctgtgggacgtagtcgcgccatgccaccgcgacggggcgaagtacgtaaggatcaaccacgttaaagttgaagttaaacatcgtgcggttaaacccttctaacgggtctgagcgcccctgcggccgatcgccagagctggaactggcacatcccaccagcaatgtggcgccaagcgcaagcgccgacaggcgataattcatagatgtctccctggtttttatggctatcgcgagttgccatccatgacggaaagacaacgcttccgcccgtaaagatgtgagcgattgtaacagcacgttgaacgatgtctatatcacccaagttgttgatttgatcttagcctgggaataacgaaatcgcggggctcctattctaccggagcgacaaaaatctgacgttaccatttttgcgatttcagagtatgcccagccagacggcagggaaagccgctacgctataactatacagattgatagcgagggccacgaaatggatgaactagacaataacaaattaaaggcagaggatgacgaaagagaagtggaaagtgaggaaaatcagcgtggtgaagagatcgaagtaaatgaagatcgccttccctcgcgggcgatggcgatccatgaacatattcgccaggaaggggaaaaagagatggagcgcgatgcgctggccctgctatggtcagcgattgcggccggcctgtcgatgggggcctccttgctggcgaagggaatttttcacgtcaaactggaggggatcccgggcggttttttgctggaaaacctcggctacaccttcggctttattatcgtaattatggcccgccagcagctgttcactgaaaatacggtcaccgccgttctgccggtgatgcataatcccaccctcggtaacgtcggtttgctgatgcggctatggtcggtggtgctggcgggcaatctcatcggtaccgcggtggccgcatgggccttcaattatatgcctatttttgatgagccaacccgtcaggcctttgtcagcatcgccgaagacgtaatgaaaaacagtccgacagagatgttcgccaatgcgattatttccggctggctggtcgccaccatggtctggatgtttcctgtcgccggcgccgccaaaatcgtggtgattattctcatgacctggcttatcgccctggcggataccacccatattgtggtgggctcggtcgagatcctttatctggtgtttaatggaaatctgccctggagcgactttatctggccgttcgccctgccgaccctggcgggaaatatctgtggcgggaccttcatcttcgcactgctgagccatgcgcagatccgtaacgatatgagcagcaagcgaaaagcggaagcccgcgcccaggcggcggagaaagggaaaaaggccgaccgggcataaaaaaagcgccctgagtggcgagggtttaagcagtcagacggtatggctcttactcaggcgggcaaaaaacgctatactcgtgccgccttgtccccttagttaaatggatataacgagcccctcctaagggctagttgcaggttcgattcctgcaggggacaccatataaacgttgcccgccattcaccacgatgacctaaacgccagccagaacgtattcttctcgtaatcataattagccaacgatttcagtatggttagtcctgccagaaaggaacgtgtctttgtcaatcacgcacacaataaaccgacagcaacgcgcatttctgcgtacaataccttctgactttttcagtcactagccgcgaccttttacaaccttctctggacgatacaggagccaggcgttgatatgaaacagatcaccctcagcgatatgcagcagcagagcgaagcggcagccagtgctccgcgcctgcgtgcccatcgcaattttcatcccgaactaagcgacccgatacagcgtctggccatcgccatggaacccggcacctatatccgcccccaccggcacaggcatactttcgaacttttgctgccgctgaaaggccgttttgtggtactgaattttgatgaccacggcgtggttacccgccgggtggtgctgggtgaaacctgcacggcgctggaaatggaagccggtacctggcatacggtgctctcactcgaccctggcgggatggtatttgaagtcaaacaaggcgcttatcaaccgcttgccgaaatggacactatggcctgggcgcctgctgaaggccagccaggcactgccgaaatgatggcctggtatgccatcgcgcaaccgggtgaccgcttcctgtctatgccgcaataactacaggtaggttcgacaggcgccgcaggcgtctgtttgatacttcctgccgaccacaaagtttgccaaattgaccgtcccttttttcgtgctccgctcatactcaccttaaatattgctgctaaacaggaagaaacgcttatattcagcaaactatttttctctacgaataagagatgataagataacgggaaagagtaaatatgcggcagcaaaacaataaaaacagccaatttatcgatatattattctcaatgtgaatggattttgttaatcaggtaaaggaagtcagcagaaaaaataaatcattgtcattgatgcttttgctcaccatggcgatttattttttcatcgacatacaattcttatgaatattacagaacggaatatctggaagctaaataatttaccgccaatggagtattgctctctggcgcgggcgcaaaaattattaaactgcgaactggaagacattcttcactggcatgatattggcgcaatcaatctatgtcttaagcttaacccaacgccgggaatattaaaaatcgccgtcctctcccatcaggaaaaagaggtaaccagcgcgtttaatccatttacctcagtcgaggtaggagaaacagtctggtcgcaacactcccatatccgcagcattctgcgacttgaaggcgatattccgacgatggaaaccctgcgcggaaatacggtaacccagttcaacgtaaaggtatttgcttcagggctctggcatccacactgtcggaacctaatggcgctgctggaggcgccagatgatattcttttcgaaaaccgcctcagcatgatgctgccggataaaccatttgtttattgtcatttcattccagaggaagacgaacgcccctcgatatcattgaaccgcatctatatcaccagccaggccattgagaaaatatacgcccacagtattagcgcccggcctatggacgtgacgaaaaatccgctactggatcaaacccgttacatccagcaggaattaaccgtcctgccgcaaagtgaggtattgctggaatttatccattatcttgttcagtcccatactgtatttaatgagaagttgcagagtatggctgagccagacaagactcagctctttcatcacgtgctggaaaggcttaaggaagaaggcatgcttatagagaatgcccagcccgatgaaggcgatatcggcagcgaagccagccgtgagtcgcagttcgccggcgagtaacgtagtccttcaggcaagggactggcggctttcctgctcaatcgttatcgtgttctctcgggccagggtgatgaattcgcgcgctgcggcgctctgccaggcgccctgccgctgcaataaacaggccgtgcgctgcagcagcgcaggtcttagctcaatcgccaccacatcatcaaactgtccggcgatcgccgccggcagcagcgttgctaacgttgtgcttcgaataaccgacagaacggccccgatggagttggcctccatccgcacgtctggttcgagccgatgaaggcggcaataacgatcaatctgctcgcgggtagcaaactcgctgctcagtaaaattagcggctgggcgtcgagagccagcagttgcaagtcgcgctctcctgccagcggatgcgcacggctcaccaccagagcaagcgtttccgtcagcagcggctgaaccacaatttcctgtgaccggctgtcgtcaaaggcaatccccacatccagttcatcctccagcagcatcgcctccatccgctcctggttcatctcctggataagcacttttactccaggatagcgtcggtagtacgcctccatcagcgggcccagcatataggtagtgaaagttggcgtcatagcaatgcggagtttaccgtgctggagatcttctgcgtcatgcaaggcgcgccgaccttcctcaagctcgcgtaacgcgcgacgggcatactccagccagatctctccagcatcggtcaggcgaatacgtcggccagagcggtcgaaaagctgaacctccagcatcgcttccagctggcgtatctgctgtgacagcgcaggctgggagacatgcagcgccgcggcggcgcgggaaaagccacaatgttcagccacagcgataaagtaggaaagttggcgcagaagcatcggcccacctataagaaattccaataggcattatcataaataagtcttttaacttatgaaacaagagacgtaccctcttcgcacgaccctcaacatatttcacctttaacatcgttttatgcaggagtgactatgtccgctcacgatcgttatcttcagcgcgcattagtgctggcaaaacaaaacattgctgacggtgggcgccccttcggcgccgtgctggtgcggaatgatgagattgtcgctgaaagcgtcaatacctttcatctgagcggtgacccaacggcgcatgccgaactgaacgccgttcgcgatcttgccgccagactgggaagcgcggtgttgcgtgaatgcgtcatctatgccagcggacaaccttgccctatgtgcctgagcgcgctctatttaaccggcgtgcgggaagtgtttttcgccaatagcaatcaggacggggagccttttcagctctcgaccgccgcgatttatcagcagctgcagcagccgctggcccagcaaacgctgccgatccatcatcgcccgcagccggagggaactgaactttatcagcgctgggcggaacggcagtcatgacaccagcgctgcgacagaacctgacgctggcagtcctggtactgactgggatcaatatgcggccgctgcttacctccattggtcctttgctgccggacatccgcgcagccagcggcatgagctataccctggccgcactcctgaccgcgctgccggtgatcgcgatgggggtgctggcgctggccgctggctgggtcgatcgctatatcggtcaaaagcgcagtattgcgctgagtctgctgattatcgcggcaggcgccctgctgcgggaaatcgccccgaatagtggcttactgctcaccagcgctctggccggaggaattggcatcggcattattcaggccgccatcccggcggtaattaagcacctctttccccgacggacgccgctggtgatgggactatggtcagcggcgctgatgggcggcggcgggttaggcgccgcgttcaccccatggctggcgtcacatagcgcggtctggcatgatgcgctagcctggtgggcgctccctgcgctcctggctctgttcagctggctggcgatttgtcggcaattgcctcgcgcaccgcatcagaccagcgcttccccccgggtcgcgattattggccagcgccgcgcctggacgctgggactctatttcggactgatcaatgccggttacgccagcctgatcgcctggctgcctccttactacatccagctaggcgatagcgcccagtacagcggttcgctgctggcgctgctgaccgtcgggcaaaccgccggcgcgctgctgctcccggcgctggctcgccaggaggatcggcgccagcttcttctgctagcgctggcgctacagctgattggcttctgcggctttatctggctgccagagcatttctctgcgctctgggccattgcctgcggcgtggggttgggcggcgcgtttcctctgtgcctggtgctggcgctggatcacgccggacaaccggcggtggccggcaggctggtagcctttatgcaggggatcggatttatcatcgccggtctgtcgccctggctttcaggcctgctgcgtagcctgagcgggaactacacgcttgactggtcctggcatgcgatctgcgtcctgctactcatggcgctgacgctgcgctttatcccggcacactacccggccgagtggcgacagcgcgcctcagacctgccctgaaccgacggcggcgcgtggcaaagataatgccgcgcgctctcgttggccttctccgcccgccccatcgctaaaacccgtttccttcgcgtcgctggcgctaaatttattaccctgtgaaattaatgtgtcgccgaatcacgacactcgtaagtaactaaaaattaataaaaaaatgcctcttgtttccctgattttttaggcgtacattagcgccatctggagcactaaacgcacagaattacgggctgctgcagggtgaagttacacaggcggcagcccttgaaaaaacagaacaattaattcatttgaacgtcgcacaagcgcgtggagtgatgagtcgtgaaatacttttttatgggcctctcttttatggtcatcgtttgggccggtacttttgccctgatgatctagactgcagcggtgtcaaaaaaaacgggagccttcatgctcccgtttttattttgccgtgctgcccgcagcgctagctcgcggaggccagcagaccatccgcgcggaacatcgccttgataccgcggatcgcctggcgcgtacggtcccggttctcgatcagggcgaagcggacgtgggtatcaccatagtcgccaaagccaatccccggcgagacgcaaaccttcgcttcattaagcagctttttcgcaaactccagcgaccccatggcggcgtaaggttccggtattttcgcccacacgtacatagacgctttcggacactccaccatccagccggcctcatgaagccctttgaccagcacatcgcgacggcgcttatactgttcggcaatatcgcgcacgcactgctgatcgccctccagcgcagctatcgccgccacctgcagcggagtaaaagtcccgtagtcatgatagcttttgatacgagcgagggcattcaccaaagtcttattacccaccataaagccaatgcgccagccggccatgttatagcttttcgacagggtaaagaactcgacggcgacatcccgcgcgccgggcacctgcatgatggagggcgctttccagccgtcatacacgatatcggcataggccagatcgtggacgaccagaatgtcatactgcttcgccagagcgacaaccttttcaaagaaatccagttcgacgcactgcgcggtcggatttgagggaaagccaaggatcatcatcttcggcttcggatagctctcgcggatggcgcgttccagctcgttaaagaaatccaccccttccaccagcggcactgagcgtacctgcgccccggcaatcaccgcgccatagatatgaatcggatagctggggttcggcaccagtacggtgtcgccatgatccagcgtcgccagcatcaggtgcgccagcccctctttcgaaccaatggtgacgatcgcttccgattccggatcgatatcgacgttatagcgttcttcataccagcgtgaaatggcgcgacgcaggcgcgggatcccccgcgaggtagagtaaccatgggtgtcaggccgttgagcaacggtgcagagtttttccacgatatgcggcggcgtcgcgccatcgggattacccatactgaaatcgataatatcttcgccgcgccgacgcgcagccattttcagttcagcagtaatgttaaaaacgtacggagggagacgatcgatacgcgtaaaacggcgttcaggactggattcagccataggttcctctaattaacgttagcgcccggaccgtccgagcgacgctgccgctgttgcggctcgtttagaaaataacctgaaaaaattcatgttgtcgagaggcccgttaaaaaatattccctggcatataaaacgggtatcgactgtgctaaatgcggcagttcattggcggaataatcccgggttgtataaaggtggtaacacactgatatctttcttaacacagaatattatcgttaatggcgaagaccgccgctatcgcgatgctttttaattaatcccctttaaaaagtgcgacttttccgctttatggttccacggctggtcttctgccgtcaggttttttatcatgtccctttctggccactgacgcggcgcacccatgcacgaaatctttactatgatgctggcggtctatgatcgtgcggccctgatgcttatttgcctctttttccttattcgcctgcgcctgttccgcgaactgttgcataagtcggcccatactccgaaagagctgctggcggtgacagccattttctcgctgttcgcgctatttagtacctggtccggcgtcccggttgaggggtccctggtgaacgtgcgcattatcgccgtgatgtccggtgggatcctgtttggtccctgggtgggcgcgattgtcggggcgattgccggcgtgcaccgctatttgattgatatcgacggcgtgaccgcggtgccctgctttatcaccagcattgtcgccggcctgctgtcggggttgattaatcgtaaagtggcccgcgaacaacggtggaaaatcggcattctggcggggatgatgtgtgaaactctgaccatgatcctggtggtggtctgggcgccttccctgagtctcggcgtagatattgtttcgaaaattggtatcccgatgatcctcggcagcgtctgcatcggctttatcgtgctgctggtgcagagcgttgaaggggaaaaggaggccagcgcggcgcggcaggcgaaactggcgctcgatatcgccaacaaaaccctgccgctgtttcgacacgttaacagcgattctctgcgccaggtttgcgagattatccgccgcgacattaccgccgacgcggtggcgatcaccaataccgagcacgtgctggcctacgtgggcgtcggtgaagccaactatcaacgccacgacgatatgattagccccaccacccggcaggcgattcgttatgggaaaatcatcataaaaaacaatgacgaagcccaccgcaccccggagatccactccttgatggtgatcccgctgtgggaaaaaggggtggtgaccggcacgctaaaaatctattactgccacgcccatcgcatcacttcgacgctgcaggagatggcgattggcctgtcgcaaataatctccacccagctggaagtctcccgcgccgaacagctgcgggagatggccaacaaagcggagctgcgcgccctgcaaagcaaaattaacccgcattttttatttaatgcgctgaacgcgatctcctcctcgattcgccttaatccggacaccgcgcgccagctcatttttaatctgtcgcgctacctgcgctataacatcgaattaaaagacgatgagcagattgatatcaaacgagagctgtatcagatcaaagattatatcgctattgaacaggcgcgattcggcgacaagctgacggtcatctacgatattgacgacgacgtcagctgcgtgatcccgagcctgcttatccagccgctggtggaaaatgccatcgttcacggtattcaaccctgtaaaggcaaaggcgtggtgacgatcggcattaacgagtgcggcaatcgggtacgcatcagcgttcgcgatacgggcaacggtatcgatcccgccgtggtcgcccgcgtggaagccgatgagatgccgggtaacaaaatcggcctgctcaatgtgcatcatcgggtgaaacttctctacggcgagggtttgcatatccgcaatctgacgccgggaaccgaaattgccttttatgtccccaataactctacgccgcaggcgctgacggagtcgctgttgtcatgagcggagaaaagatgaaagttatcattgtggaggatgagtttctggcccagcaggagctctcctggcttattaacacccatagccagatggagatcgtcggcagctttgacgacggcctggacgtgctgaaatttctccagcacaacaaggtcgacgccatctttctcgatatcaatattccgtcgctcgacggggttctgctggcgcaaaacatcagccagtttgcccataaaccttttatcgtctttatcaccgcgtggaaagaacatgcggtggaagcctttgagctggaagcctttgactacatcctgaaaccctaccaggaatcgcgcatcatcaatatgctgcaaaagctgaccaccgcctggcagcagcaaaataacgctgcttcaggattagccagcgcggcgccacgggaaaacgacaccatcaatctgatcaaagatgagcggattatcgtcaccagtattcatgatatttattatgccgaggcgcatgaaaagatgacattcgtctatacccgccgggagtcattcgtcatgccgatgaacattactgaattctgcagcaaactgcccaccgcgcatttcttccgctgccaccgctcgtattgcgtaaatctcagcaaaattcgggaaattgagccgtggttcaacaacacctatgtgctgcgcctgcgtgacctggagtttcaggttccggtcagtcgcagtaaagtgaaagagtttcgccagctgatgaatctgtagagagcggaaagcgccgccatccgggctacgacggtagcccgggagaagaatgcttaaagcacctggcccagcgtctgacgcagatgcgcgccggagcccagcaggcctgggttatcatgcacgatcaggtaaaccgggatatcctgaacataagctttaaaacggcctttgtcttcaaaaccgccgcggaaaccagaggctttaaagaactccaggaagcgcggcacgatgccgccggcgatatacaccccgccaaacgtcccgagggtcagcgccaggttaccgccgaagcgtcccataatgacgcagaacagcgacagcgcccgacgacagtcggtgcagctgtccgccagcgctcgctcggtcacctcacgcggctgcaggttctccggcagtcggccgtccgatttgacaatcgcgcgatacaggttgaccagcccgggacctgagagcacgcgttctgcggaaacatgccccagctcggcgcgtagctcttccagaatgatcccttcttcttcgctgttcggggcaaaatcaacatgaccgccttcgcccggcaggctgacccaacgcttatcaacgtggaccagatgcgccacgccgagcccggtcccggcgccataaacggcgatcggtttgcccgctaccggcgcactgccgccaaactgaataaggtgctcagctttcagcatcggaatggccattgaaacagcggtaaaatcgttaattatctccagatgggcaaagccgaggttacgcttcatttcggcgatagagaaagcccaggtatggttggtcatcgccacccagtcgccggtaatcgggcatgcgatggcgatacaaccttcgttgaccgttacctgatgctcctcgagatagacgcgcaccactgcctccagactggggtaatcgagcccggaataggtctttgcgcgagagatctctccactcgccagatcacatagcgccaggcgggcgttggtccccccgacatctcctactaaagcaaattttgtcattccgttacggctccgctaaagtcaaaataaatcttttggcacactgtaaattcatggcggcttaacaacaacgtccaacgcgcagacgccccttgtttagcgacacaggtcacatttagtttgtaatctatgcaaggtagcctgtaaaggacgcgccggatatcagatgtcaccttaactttatcgtttcagcaccatttgcatcgacggtctccgctgacgaaggcaaagtagtgctccagcacttttacaaggacatttccatgctccatcctcgcgccagaacaatgctgatcctgtcggtgccggccatcctgataggtatcgcctgcagcctgatcctgatcgtggcgatgaaggttgccgcgctgctgcagcgcgtgctgtggagcaatctgcccgcgcagttaggggtgagcgccgacagcccgctgtggatcatcgccatgctgacggcgacaggcatcgcggtgggtctggtcattcgatacagccccgggcacgccgggccggatccagcgaccgagtcgttaatcggcgctcccattgccaccggcgcgctgcccggactcctggccgcgctgatcctcggcctcgccggcggcgtcagcctcggcccggagcatccgattatggtggtgaatatcgcgctggctgtcgccgtcggctcccgtctgtttccgcgcgtcagctcgctggactggaccatcctcgcggcctcaggcaccatcggtgccctcttcggtaccccggttgccgccgcgctgattttttcgcaaaccctcaatagcagcaacgatacgccactgtgggatcgcctctttgctcccctcctcgccgccgccgccggcgcgttgacgacgggtctgtttttccatccccatttttcgctgccgatcccgcactatggtcagatgcgcttcgttgatattctcagcggcattatcgtcgccctgatcgctatcgccgtcggcatggtggccgtctggtgtctgccgcgactgcatgccctgatgcatcggttgaaaaatccaatcctgaccctcggcatcggcgggctgctgctggggatcgtggggacgataggcgggcccttaacgctatttaaagggctggatgagatgcagcagctggccttcagccagacgctaaccgccgcggattttctgcttatcgcgctggtcaaactggcggccctggttcttgcctcagccagcggctttcgcggcgggcgaattttcccggcggtgttcgtcggggtagcgctggggctgatgctgcatgctcatgttgacgcggtgccggcggcaatcaccgtttcctgcgcgatcctcggcatggtgctggtcgtcactcgcgacggctggttgagcctgtttatggccgccgtggtggtcccggatactactctgctgccgctgttgtgtatggtgatgctcccggcctggctgctgctggccgggagaccgttgatgattgccaaacggcataccgattaaacgcggctgtttcgctcctcaagggcctgcgtcaccgcgcgcaggaaatcggggatatccattttcggcagcatcacttctaccagggtgagggtatcggaggtgatgctctccgtcatcgcctcccgcagttcagacgtctgagtgacccgccggcagcgcgaagcaacgtcaggggcgaaggcttccggcagccgctgccagtcccacagagcgatgtcattgtagcgctgctctggaccatgaatcgcccgttccacggtatacccttcgttattcagcagcagaataagcggcttttgcttatcacgcagcatggagcccatctcctgaatggtcagttgggccgcgccatcgccgacaattagcaccacccgccgctccgccgccgcggtttgtgcgccataggcggccgggagagtaaaaccaatcgagccccacagcggctggacgatcagcgatgcttcagagggcagcttcagcgccgcaataccaaaggcggccgtcccctgatcggcgagaataatatcccccggacgcagggcgccctgcaccgtcgcccagaaatttttctgggtcaactcgccttcagcgccctcctcagcctccggcgccacgacctgaggcgtagcccactccgccgccagcggggcggaaagcgtcatcagcgcggccagggccttatccatcggcaccccgctgaaccagtgatcgcccaccctgacggcgaagggctggatctcaatagtcttttcccgcgccagatgttgggtaaatcctgcggtgatggtgtcggtgaagcgcgtgccaatgcagatgatggtgtcggcgttttcaatcgcctcccgggtctgcggcgcgctggcaatcccgctgtaggtgccgacaaacccgctctgctgctcatcaaacaatcccttgcccatgagcatcgtcgcatgggcgacaggcgttttcgccacccactcccggagcgtcttctgcaggccataacgttgcgccaggaagtccgccagcagggaaatgcgtcggctgctccgcagcaggcggctggcatgttcgcagaacccggcaagctggttttcatccgccggagcgggctccaccagcaagcgctgggctggggcaatcgctgccgctctggcgacatcggctggcagcatcaaatagccggggcgatgatgcgtcaacatatcgcgcagcacacggtcgatttcatggcaggcgttgccggcggtcagcagcgcctggctacaggtgatctgctcgctcatgcgggcgaaatggcgaaaatcgccatcgccgagggtatggtgcagcagttcgccgcgctgctgggcgccggtagagggcgcaccgacaatatgcaataccggaatatgttccgcatagctacccgcaatgccgttcagcgcgctcaattcgccgacgccgtaagtggtcagcagcgcaccggcccctttgatgcgcgcatagccgtcagcggcatatgccgcattcagctcgttggcgcagccgacccaccccaaggcgctgtgcgcgatgacgcgatcgagaaactgtaagttgtaatctcccggcacgccgaacaagcgatcaataccgcagtcgacaaggcgatccagcagataatccccaatagtgtaggtcggttgcatatccattatcctcattttggtgcaggtgtaatttgagtattgaataagcgatccgcctgtccagatgggagctgataatggcagtgtaaagcaataattacgcagaaaaagcagtgtactccacgcagaacattgtttagtgtaaacgtatacacatcctgttttgtcggcggaggaagaatggtttaccaggcaagcaccacgcgatatcaaacgatggagtaccgtcgctgcggccgcagcggtctgcagctaccggctatttcccttggcctgtggcataactttggcgatgaaacgcgagtggaaaccagccggcagatgctcctgcacgcttttgacctcggtataacccatttcgatttggccaacaactatgggccgccgccgggctcggcggaaagcaactttggccgcatcctgaaagagtcgctcctgccttatcgcgatgagttaatcatctccactaaagcaggttacacgatgtgggacggcccttacggcgactggggatcgcgaaaatatctggtagccagtcttaaccagagccttaaacgcatggggctggaatacgtcgatattttttaccatcaccggcctgatccacagacgccgctgatggaaacgatgcgtgcgctcgatcatctggttcgtcagggtaaagcgctatatgtcgggatctccaactatcctctggcccaggcgcgggaggcggtgaagatccttaacgacctcggcaccccctgcatcatccaccagcctcgctactcgatgttcgaacgcggcgtggaagaaggactgctggattttctgcagacggaagggattggaagcatagcgttttcaccgctggccggtgggcaacttaccgaccgctatctcaacggcattccggccgactcgcgcgccgccagcagcagtcgttttctgcagccggagcaactgactccagcccgattagaaaaaattcgtcagcttaacaggcaggcggaagcgcgtgggcagaagctgtcgcagatggcgctggcctgggtgttgcgcgaagagaaagtcacctcggtgctgatcggcgccagcaaaaccgcgcaactggatgatgccgtcggcatgctgctgaatcgccatttcaccaccgaggagtgcgcggccatcgacgccatccttgcgctgtaaagcaaatgttactttagcaaaaagtgctctttcctgcgctttcggagttcgtccgatgcggcgggtctttaccgacccgtaatatcaggttaacaggccgcttacggccccgatcgtgaaggagaagagtatgttcaggtcactgattctggcagcagtactgctggccgcagggccactggtcgctaacgctggtgaaatcaccctgctgccatcggtaaaattacaaataggcgatcgtgacaattacggtaactactgggacggtggcagctggcgcgaccgtgattactggcgtcgtcactatgaatggcgtgataaccgttggcatcgtcatgacaacggctggcacaaaggctggtacaaaggcagagataaagcctgggagcgcggctatcgtgctggctggaacgaccgcgatgaccaccgcggcggctggggacgcggcccgggcgggcgcggtcacggtcatggacatggccatcactaacaaacgaaaaggggagcccatcggctcccctttactttattcagcatcaggaatcaattaatccaccccgagcagcgaccccactattaaccagccgttcaggctcaccacaatagcgactatcgcccagccgatgcctctcacccaacgggtattcaccaggtcccccatcagcttcgcattgctggtaaatatcagcagcggcaccagggcaagcgcaatgccaaagctgagcaacacctgactcattaccaggatgcgcgtaggatccagccccagcagaatgacgacaaacgacggcagcatggtgatcgcccggcgaaaccacagcggaatatgaaagcggataaacccctgcataacgacctgacctgccagagtgcccaccacggtcgacgataaaccggcggcaatcaggctgaggccaaagatggtcgccgccgcgtggctcagcagcggctccagcgtcatgtaggcctgatcgagatcggcgacgccggtatggccattaaagtggaatgccgccgcagcggtcgccatcatcgccagattgacgaacccggcaatggtcatggcgatcgccacatcccagcgggtcgcgttatagcgttcttttcgcgttccgccatgcagatgctgagtcagcgatgagtgtaagtaaatgacgtgcggcataatggtcgcccccagtaccccggcggctaagaataccgcctccccgttgggcagcgtggggatcaccagccctttcgtcagaggagccagcgcgggctgggaaaagatcaactccacgacataggccacggcgacaaacagcaacaatccaccgatcaccttctccagtggtttttgtccgcgccgctgcagcatcaggatcagaaaagtcgccaccccggtcagcaccgccccctgcagaagcgacacgccgagcaccagcttaaagccaattgcggcgccgataaattcagccagatcggtggccatagcgataatttccgcctgtacccagtaaaaccagacaacaggacgcgggtaatggtcgcggatctgctcggccaggtttttgccggtggcaatgcccagtttggcagaaagcacctggatcagcatcgccatcaggttagcccacaccacgacccacagcagctggtagccaaagctggcgccggcctgaatgttagtggcgaaattacccggatcgatatagccaatggcagcgacgaaagccgggcccattaaggcgagcttcaccttgcgcgcggcgcgactactgctattctcaacgcgactgctagtcatcttctgcctctggaaatatagcctttgctatgtttcatgctatcaaaatgcgaatgattatcaagttcatttagaatggagataatgattgctgtgatagaagggaacaatagctggccggaaatgaaatacgggcgtcagaaaacgagatccagcccgctattaagagtagtacaagaatgcaacttttaaaacctttacgtaacataacaaaagtggatgttggatcactatttttgccattggtcacagttccttgcaatagtgtgcaattgatctcgttttctttaaagccgttgcatagaatgtgcacggaaatttaacctgcctcatatttggagcaactatggaccgcgtcttgcattttgtcctcgcgatcgttgtggtggctatactggccctgttggtcagccatgaccgccaaaagatccgtattcgttatgttgttcaactgcttgtcattgaagtcctgctggcctggttcttcctcaactccgatattggtctgggttttgtgaaaggattttccgagatgtttgaaaaactcctcgggtttgccaacgaagggacaaacttcgtgttcggcggcatgaacgataaaggcctggccttcttcttcctcaaagttttgtgccctatcgtcttcatttcggctttgatcggcattttgcagcatattcgtatcctgccgattgtcattcgcgcgatcggtaccgtcctgtcgaaagttaacggcatgggcaagctggagtccttcaacgccgtgagctcgttgatcctcggccagtcggaaaactttatcgcgtataaagatattctcggcaaaatgtcgcgcaaccgcatgtacaccatggcggcgacggcgatgtccaccgtgtccatgtccatcgtaggcgcttacatgaccatgctgcagccaaagtatgtcgttgcggcgctggtgctcaacatgttcagcacctttatcgttctgtcattaattaacccttaccgcgtggaagagagcgaagaaaatctgcagatgtcgaatctgcacgaaggtcagagcttcttcgagatgctgggcgagtatattctggcaggttttaaagtcgcgattatcgtggcggcgatgttgatcggcttcatcgcgctgatctcggcgctgaatgccctgttcgccaccgtgaccggttggttcggctatagcatttccttccagggtatcctcggctatatcttctacccggtcgcctgggtgatgggtgtgccggcaagcgaagcgctgcaggtgggcagtattatggctaccaaactggtctccaatgaattcgtcgccatgatggatctgcagaaaattgcctcgacgctctcctcgcgcgcggaaggcattatctctatcttcctggtctccttcgccaacttctcatctatcggtattattgccggggcgatcaaaggtctgaacgaagaacagggcaacgtagtttctcgcttcggtctgaagctggtgtacggctccacgctggttagcgtgttgtccgcctcgattgcggcgctggttctgtaacagacgtcagtcatctgagccgggcaatgcccggcttttttttgcccgacattcacccagcggctgtggtttaccgatcagataaccctgcagataattcacgcccagctccagcaagcgcgctttttgcggttcgctttcgacatattccgccaccacgctcatctgtttcgcccgcgccatctcgacaatcgatttcaccatgatggcgtccagcgggtccgtgaggatgtcgcggacgaagcagccgtcaatcttaatgatatcggcctgtagatgtttcagacgttcatagttcgcatagccggtgccaaagtcatcaatagcgatggcgcagccaaacgcgcgcaacgcttcaagattttgccgactggtgtccgcattagagaaggcctgctcttcggtcacctcaatagttataagttctggcgagacgctatagcgttgaaacagcgcgataatctgccctgcgctgttcttttgcatcagagttgcaggcagcaggttgaccgagaagcgctggccgggatgcttatggagcatactgaacaaggtctccagcaccagcatgtcaaaacgttggctgaggttaaactgcacaatcagcggaatgaatcggtcgggcataatgacgctatcgccacagcgcatgcgcgtgaggatctcatgataaccctccccctccggattctgaatcggttgcgcatagagcatcagcgcgcgatctttgagcacttgcttgacgcgcattaggaggcgcacctgctcggtagtttgatccaccaccagatcctgctcctcgtccagcgccagcacccgacgttcactgcccgcctgttcggaaagccagcttagctggcccagcatctggtaaagtccctcaccctggccgtcatcgcggccccaggccgcgccaaactccaaatccagcggctgattgtgccagctgaactttttgtggttgaggaccgcgaccatgtgattcaagcgggacgacggctccggcccatcaagcacgaggatcagttcgctgcccggtacctggaagactttatccgccgctcccagcagcggttgcagcgcccgaataatctgccgtttacagtccacccccatcatcagaccataatgccgactgagaaagtcgagattatcaatacgcaggctgcagatagcctgctgaggacagctctgtaaatggctctccagcgcgcgcaggttaggcaagccggtcagcggatcctcttccgcctggctacgccagcggcgtttgttgcggtcgctgcgggcatagatgtcggccatataaaacaaacagatagtaaaggagatcagaaccgacagcacaaaggagagtgaatactcgctttgcaccccctggagaaagtttttgttatataccaccagcaaaaaggccgagacagaccatgaaatacgcaatagcgcatggcctattcgactgataccgataaagtagacaataaaaataaccggaactaaataaccggcaataaattcagactgatacggcgcacacaatagcgttaatatcaccgccaacgcgataaaccaatatagggtaaaggagcgatattgcggtgccagccacggtaaacattcctgctgccagaaacgtcgggcgtagcgcggactgataatcatccgcattggataataaagaaacgtcgtaaaaattaatgccgcactgattaaactttggatatctattacagtataaatcaacggcatactaccaaagtaactggtaatagctaatggaaacgcaaaatattgtccggcgagatacatggtgattttcaggagcaccggcgcgaagaagccgccccagaagatccgcgcccccatatgttttgccgttggaccgcagcgccagcgcttccccaccaacagtcgcagaatagcgcaggagacaaacacggcgaacagttgacaaaaaagtaagataaacgcctgcggcagcgttaatttaatgagaaaactattggtgatggcaaacgcgagaattaatggcgcaattgcatagcggccaaagataaaaataacagaaaacatcacgctgattggcagccaggcaatataaataaggttgccgtcaattatcgtttgcggtgaaataaaacgagccagcggaatagcgactaaacaaatgataaaggccaatagagtttttttgatattaatgttaattttatcaagcattattgttaattaaaactccagaaacctcatcacgtttaatgggggaaatgttatgttgcttatttagggcaggcaaggcgaattatcaggaaaaagtctgaaattactttcgattttaattgctggagattaactgacgtaaccagaaagtgctttacatgaaacccgctaaaaacaaaaacccccgccgaagcgagggttctgaattttggtggagctaagcgggatcgaaccgctgacctcttgcatgccatgcaagcgctctcccagctgagctatagccccacaggacttctttacgaaccaaatccgctgggtgcagaatttggtggagctaagcgggatcgaaccgctgacctcttgcatgccatgcaagcgctctcccagctgagctatagccccgtaacgtaaagcgtgtcgtgttgacgggcggcataatatgaattcctcgctcaggtgtcaacggcaaaattatccttcccgattcaatcgctgaaaaagcaggcaacttgctgacattgcgagccttatcgcagtcagaggttaaacaggtcaccttttcacgtaaaaggatgctataacatgggcagctaattcccatacttttactcaggaaatagtatgctcaaggaacgaatgacacctgaagaaattgcccatctaaccggctacagtcggcaaactatcaataagtgggtgcggaaagaaggctggcaaacctctccgcgacctggcgtccagggcggcaaagcgcgcctggtccatgtcaatgagcaagtcagggagtttatccgcagcgcccagcgcgtggcggagacgcccggcatctattctccccatgatagcgatctggaatcgctgctgctgaccctcagtaaagaactcacccccagcgagcagaagcagcttatgtctttgttgctgcgcgaggggatcaccgggttactgcttcggttagggatccgcgatcggtaaaccatgatgaaactgaaagataaaatgacgcccgcagagcttgccgactgcctggggctggccagacaaacgatcaatcgctgggttcgcgagaaacaatggcgcaccgaagcaatacccggcgttaaaggggggcgagcgcgactggtggttatcgaccaaccggtacgcgagtttctgaccaacatccctgccagacgccatctgcttaccgacaatcatctcgcggaatcgccaggtgcatacctggtcaatgaggcagacgcgatctggcggcaaatcacggaaaccctacagctgatgactccggcagaacagctgcagctccgcgatctgctggcccgggaagggattagcggttttcttgcccgcctcggcatcgccagtccggaataacagacaaaaaaaacggcagggtaacctgccgttgtttcagctgcgtcgccgtcaggacgcctggccttcgcgttcagcgataaaagccagcgctttattgatacgatctacgctacgggatttaccgatagcatggacagtaacgtctagcgcaggagattgccctgccccggtaaccgccacgcgcagcggcataccgactttacccatccccacctccagctcatcagcagttgcctgaatcgcgtgatggacgttttccgccgtccagtcgctaatcgccgccagcttatcgcgaaccatttccagcggctgacgcgccactggacgcagatgttttttcgcggcgtcggcatcgaattcagcgaactcttcatagaagtagcggcagctctgggccatctctttcagcgtcttgcaacgctcgcccagcagtttcaccagctcagccagctgcgggccgttgcgagtgtcgatattttcctgctcgatatgccactgcagatgcgttgccacatactccgccggcagggtattgatatagtgatgatttaaccacagcagtttatcggtgttaaaggcactggcggatttgctcaccgcgcccagcgagaagaactcaatcatctcttcgcgagtgaaaatctcctgatcgccatgagaccagcccaggcgcaccagatagttgagtagcgcttccggcaggtagccgtcgtcgcgatactgcatcacgctcactgcgccgtggcgcttggaaagttttttaccgtcatcgccgttgatcatcgacacgtgcgcataaaccggcaccggcgcattcagcgctttgaggatattgatctggcgcggcgtgttgttgatatgatcttcgccgcggatcacgtgagtgatcgccatatcccagtcatctaccaccacgcagaagttataggtcggggaaccatcggtacggcgaatgatcagatcgtccagttcctggttgctgaactcgataggtccgcggatctgatcgtcaaaaataaccgaaccttgctgcgggttggcgaaacgcacgacgcacggctcatcgtcagcatggtgctcgtggctatggcggcagcggccatcgtaacgcggcttctcacccttcgccatctgctcttcgcgcagcgcttccagacgttctttcgagcaatagcatttgtaagcggtaccggcttccagcatctcatcgattacgttgttataacgatcgaaacgtttggtctggaaataggggccttcgtcccattgcagattcagccagttcatgccatccatgatggcttcaattgcttccggggtggagcgttcgagatcggtgtcttcaatacgcagcacaaactcaccgccgtggttacgggcaaaaagccaggaatagagagcagtacgcgcaccgccaacgtgcagatagccggttgggcttggcgcgaagcgagttttgattttcatgaattggccttacgtttaataaagatgccgatagccggcaatgtccggtggaaattatgggtcaatattctaacaccgtgggctgattcctcaatgttgttcccatcggaacgtcacggtttgccatttttgtttataaatcatgctatggcgccggtttcgcgatcgctttgtttaattttacgacgaacgaacgaattctttagaaaaggcgttgactcattttcaactctccctataatgcgactccacacagcgggggtgattagctcagctgggagagcacctcccttacaaggagggggtcggcggttcgatcccgtcatcacccaccactacttaacgtagtctccgccgtgtagaacagaaaattgagaagtgggtgattagctcagctgggagagcacctcccttacaaggagggggtcggcggttcgatcccgtcatcacccaccactttctcgccagctggattttctgtcaaaatgtgaagtaccgaagtgggtgattagctcagctgggagagcacctcccttacaaggagggggtcggcggttcgatcccgtcatcacccaccacttcgggtcgttagctcagttggtagagcagttgacttttaatcaattggtcgcaggttcgaatcctgcacgacccaccaatgtaaaaaggcgccctaaaggcgcctttttgctatgcgcggaacatggccctgccacgagtccctccgcagcaatcccccctgtcagcgctgatatagcggatcttcaaccctggcggcggttaaattctccccttcttcacgcacaatttcccataacgcctgagcggcggtcgacagcgagcgatttttcctgcatgccagcatcagctgccgctccatcaccggagtcagccgtttcaccgtcagatggctcccctgcggtaacggtagcgccagcgccggcagaacgctgatgccaattcccgattctaccatcggaaacagcgttgccgggtggccaatctcctggacgatgttcgcccggatagccagtctgctgagggccgcatcgatcagcgggcggctgccggacgcataatcctgcaggattagcctttcatcctgcagcgcctgccacggcacttctgtcaggctggcaaaaggatgatcctcccggcagagcagcaaaaatggttccgccagaaccacttcacactgaaggtctgccgccgggcccggatcaatcacgatgccaaaatccacttccccctggcggatactctccagcacccactgctggggccgatcgtgcagcacaaaatcgatatcgggataacgacgattgctgtgagcaatacactgcggaataaggtgggcggaaatcgtctgactggcggcgaccttgacggtgccgctcagttgctggccaacccgcccggcgtcgcgcagggtaatcgtcaactcatcgagcaaacgttccagcctgcccgccagctgctgacccgcctcggtgagcaccacttcgcgagtagtacggtcgagcagacggacgccggtctgatgctccagctccttgacgctatggctgacggccgactgacttaagccaatcatctcccctgcccggctgaagcttctggcccgggcgacggtgacaaatacttttaactgacgcagagagtaattcatcttttttattcatgaatagatgcaataaatcaattttatttctcaaatgaaaaaaagcacaatagcgcatctcttttcaggagcgtttatgaaacttttccgtattctcgatccgtttacggcaacgctaatcaccgttgtcctgctggcctcattcttcccggcccgtggcgctttcgtccccttctttgaacatctgaccaccgccgccatcgcgctgctgttctttatgcatggcgctaaactctcccgggaggcgattatcgccggcggcagccactggcgtttgcatctctgggtgatgtgcagcacctttattctcttcccgctactcggggttctgtttgcctggtgggcgccggtgaatgtcgatccgatgctctacagcggctttatctatctatgcattctgccggccaccgtgcaatccgctatcgcctttacttcgctggccgggggcaacgtcgcggctgcggtttgctcagcctcggcctccagtctgctggggatctttgtttccccgctactggtgggggtcctgatgaaccttcacggcgcaggcggcagtctggagcaggtcggtaaaattatgctgcagctgctgctgcctttcgtgctcggtcacttatcgcggccgtggattggcgactgggtggcgaagcataagaagtggattggtaagaccgaccagacctcgattctgctggtggtttactccgcctttagcgaggcggtggtgaatggcatctggcataaagtcggtctgggatcgctgctgtttatcgtggtggtcagcctggtgctgctggccatcgtcatcgcggtcaacgtctttgtcgcccgccgctgcggctttaacaaagccgatgagattaccatcgtcttctgcggttcgaaaaagagcctggccaacggcattccgatggccaatattctcttcccgacctccatcctcggcatcatggtgctgccgttgatgatcttccaccaaatccagctgatggtctgcgcggtgctggcgcggcgctacaagcagcaaaccgatgcgcgtctcgctgaggaaaaggccaacgcggccaaagcctaacgcgctttcttcaggggctggaccagatcgctcagcccctcagttttaatcagcagggtcaacgccatcagctcgccaagatgcccggcagggaattgatccttacgcgcgaaccacaataaatactcttccgggacatcgattaagcgacgtcccttgtatttaccgaacggcatttcggtattggctatctcgaccagctgcgctttatccacgttattctcccagcagacgcatcatttcggcttcgtcaatcacctcgatgcccagctcctgcgctttcgccagcttagaccccgccgcttcgccggcaatcaccaggtcggttttcttcgacacgctgcctgccaccttcgcccccagcgccaccagacgcgctttggcgtcatcgcgcgacagctggctgaggctgccggtaaggaccacggttttgcctgcaaacgggctatcaatctcttccgccttcaccaccaccggcgcaggccagcgaaccccctccgccagcagttgcgcaatgacatcgcggttgctctcttcggcaaagaagttgaaggtatgggtagcgacgacgatgccgacatcagggactttctgtagctcctcaatggatgcctgctccagggcttcgagagtgccgaaatgcgccgccaggcccgccgccgtcgcttctcctacctcgcgaatacctaaggcgtagaggaagcgtgcgaaggtcgtctctttggctttctcgagggcgttgactacgttttgcgcggacttcggccccatccgatccagcccggtcagtttccccgccgtcagccggaacagatccgccggggtatggacgtactctttctccaccagctggtcgatgatcttgtcgcccatgccgtcaacgtcgagcgcgcgacgggagacgaagtgcttgagcgactctttgcgctgcgcgccgcagatcaggccgcccgtacagcgggctaccgcctcgccttccacccgttcaacgtctgactgacatacaggacagtgggtcgggaagacgacatcccgggcatccgccggacgctcggaaagcaccacgttaaccacctgcgggatcacatcgcctgcccggcgaatcaccaccttgtcgccgattttcaagcctaagcgttcaatttcatcggcattatgcagggtggcattgctcaccaacacgccggcaacatggaccggctccagacgcgccaccggcgtaatcgccccggtgcggcccacctggaactccacgtcccggacgaaggtcatctgctcctgtgccgggaacttaaaggccacggcccagcgcggcgcgcgggcgacgaaacccagctgttcctgcagcgccagcgaatcgactttgatcaccacgccatcaatgtcaaagcccaggtggggacgctcttcctcgactttacgatagtaagtaagcacttcctcgggggtatggcacagggtgacgcgatcgctcaccggcagcccccatgctttgaactgcagcaaccgagccgagtggctggccggcagctcgccgccctccagcacgcccacgccgtagcagaagaaagtaagcggtcgcttcgcagtgatgcgcggatcgagctggcgcagcgaacccgctgccgcattacgcgggttagcaaacactttcccgccggtgcggcgagcttcctcattgattttttcaaacccggcctgcgggaggaacacttccccacgtacctcaaggcgtgcaggaatattctcgccatgcagcttgagggggatggcgcgaatagttcgcacgttagaggtaatatcttcgccggtggtgccgtcgccgcgggttgccgcctgcaccaacacgccgttttcgtagagaatgctcaccgcgaggccgtcgagcttaagctcgcagcagtaggtaagatgatctgtgcttttcaggcgatcctgtacccgcttgttgaaggcgagaaagctctcttcgtcaaacacgttatccagcgacagcatcggcacttcatggcggatctggctaaaggcggtgagtggcgccgcccccaccctctgtgttggcgaatccggggtaatcagctccgggtgctggctctccagctcgcgcagcttgcgcatcaggcggtcatattccgcatccggcacttccggcgcgtccataacgtggtacagatattcatgatggcgaagcgtggttcgcagttcagtcagttgttgttcgattggttccatatcacaccatcaatgataaaaaacccccgacaggcgggggttgagaaggaattgagttaacgcggaacgtcaggcgttcgcgtctttcacttcgcgaatacgatcctggtattcacgcagtttttgcggcgtcatcatgcgacgctgatcgtcaagcaccacgccgcccacttcgtcagcgatatactgcgcagactgcagcatcagcttgaagttctgcaattcatcgccgtaggaagggacctgcataaagatagtcaccccaggggtcatcatatccgccatgctgtccggattgaaggttcccggtttcaccatgttggccagactgaacaacaccggaccgctgccgtccggacttaggtggcggtggaaaatattcatttcaccaaacttaaagccggcctgctggatactgttgatcagcacttcaccgttaagctgggcgccatgatgcgcggcgacgttcatcacaatgaccgtctctttgcgctctttcggctgcggcgcggcgggctgctgcggctctaccggctgcggttccgcgacggcgggctgcgacgcggcaacaggctgtggcgcaggctgctgcggggcggctggctgcggctgagcgacggtcggcgtcaccggttgcggcgcgacaggctgctgcacaacaggctgcggctggtgttgcggttgtacgggcggctgcgcaggttgcggctgttgccagccaggctgcggagccgcatgcggcgcaggctgttgctgcggtggaaccggggcctggcgcggcggctgcggcggctggcgaaccggttcttcaggacgcgcaggctgctgcatctggcgctcgtaaggcggctggtactggtgctgcggcgactgacgaggggcttcatgctccccatgcgcgccgtgcggggcgtgagtcaccggatgaacgcggacttctcctacgccttcaacattatcatcaaagtcgtcgttttccgactcatcgtcgcgcgacttcatacgtttcagtgggcgatcgcgaaacatcgaagaacgttctttacggctggtccagaaaccatgtaccagtaaagcgattatggcgatcgcgccaacaatgattaatatcagacgcaaatcctgcatcattatattctctgttgttctaacaccttgccaccacggcaaacatttactcactaagagtatttgccgattacctcaagtgcaagtgcgtcggtcgctttcaccacataaagatgaactaaatcgtgctttttgctgttttttcgaacatttcctaactggttattgtctgacgacccgataaaataagcgagcattcacaccggatgttaaaaaaggagcaatgcctggctatggtttcatcatccgcaccgaccccgcgcagcggcgtttattatttttcgcagggctggaaactcatcgggctgccgggcatacggcgttatgtcttcctgcctttactggttaacgtgctgctgatgggcgctgccttctggtggctgtttacccgtctcggcagctggatcccctcgctgatgagccatgtgccggactggctgcagtggctaaactacctgctgtggccggtggtagtgctctcaatcctgctggtgtttggctacttcttttcgacgatcgccaactggatagccgcgccgttcagcggcctgctggcggaacagctggaagcgcgcctgaccggcgctaccccgccggacgtcggcgtctttggcatcatgaaagatattccgcggattatgaagcgtgagtggcagaagctggcctggtatctgccgcgcgccatcgtgctgttgctgctctactttattcccggcgttggccagacggtagccccggtactctggttcctgttcagcgcatggatgctggcgattcaatactgtgattatccctttgataatcacaaggttcccttcaaaaccatgcgcgaagcgctgcgcagtcgcaaagtgatgaatatgcagtttggggcactcaccagcctgttcacaatgatcccggtgttaaacctggtgatccttccggtggctatctgcggcgccaccgccatgtgggtcgattgctatcgcgatagacacgccagctggaaatagcggtaacaccttcacttgggggcggcaaaggccgctcccttatatcgcgcttattccttcttgcttatcattatttcccttccgcatatagatatgctaaatccttacttccgcatattctttaagcgggtatgctgatgccgtacccccaaatttcatacagttaaggacgggccatgagtaagatttttgaagacaactccctgactatcggtcatacgccgctggtacgactgaaccgcatcggtaatggccgtatcctggcaaaggtagaatctcgtaacccgagctttagcgtaaaatgccgtatcggcgccaatatgatctgggatgctgaaaagcgcggcgttctgaaacctggcgtggaactggtcgagccgaccagcggcaacaccggtatcgccctcgcctacgtggcggcggcccgcggctacaaactgacgctaaccatgccggaaaccatgagcatcgagcgtcgtaagctgctgaaagccctgggcgccaacctggtgctgaccgaaggcgccaaaggcatgaaaggcgctatccagaaagcggaagagattgtcgccagcaacccggaacaattcctgctgctgcagcagttcagcaacccggctaacccggaaatccacgagaagactaccggcccggaaatctgggaagataccgatggtcaggtggatgtgtttatctccggcgtaggtaccggcggaacgctgaccggcgtcagccgctatatcaaaaacaccaaaggtaaaaaagatctgatcaccgtcgccgttgaaccgaccgattccccggtgatcgcccaggcgctggcgggggaagagctcaagccgggtccgcacaaaattcagggtatcggcgccggcttcattcctggcaacctggatctgaagctggtcgacaaagtgatcggcattaccaacgaggaagctatctccacggcgcgccgcctgatggaagaagaaggcatcctggcgggtatctcttccggggccgccgttgccgccgcgctgaagctgcaggaagatgaggcctttaccaataagaatattgtggttatcctgccttcctcaggtgagcgttatttaagcaccgcgctgttcgccgatctcttcactgagaaagagctgcaacagtagtgccagcttgtaaataatgtgtaaaaaagcaccttttcgggtgcttttttgtggcacacgtcaaagttttacccctcctggcattgattcacctcgtagggtctggtatttaaccagcacatttattttgatgcgcgaaattattcagaagaggatttccgccagctgaatcgattttatgatttggttcaagtcttcctttcgcggcataatgtttaatgacgtgctagacgtcaatggcccgcaggtcttcgcagcgccaggcgctgccgacgccaaggccggaaacgtaacgccggcgctaacaatacaggctaaagtcgagtcgttagactagactttaggtccacaacactaaacctataagttggggaaatataatgttccagcaagaagttaccattaccgctccgaacggtctgcacacccgccctgctgctcagtttgttaaagaagctaaaggcttcacttctgagatcactgtaacctccaacggcaaaagcgccagcgccaaaagcctgttcaaactgcagactctgggcctgacccagggcaccgtagtgaccctctccgctgaaggcgaagatgagcagaaagctgttgagcatctggttaaactgatggctgaactcgagtaagttcacgggttctttttcatatcagtcacaagtaaggtagggttatgatttcaggcattttagcatccccgggtatcgccttcggcaaagcattgctgctgaaggaagatgaaattgtcatcgaccggaagaaaatttctgccgataaggttgatcaggaagtcgaacgtttcctgagcggccgcgccaaggcctccgcccagctggaggtcatcaaaaccaaagctggtgaaactttcggtgaagaaaaagaagccatcttcgaagggcatattatgctgctggaagatgaggagcttgagcaggaaatcatagccctgattaaagataagcacatgactgccgacgcggcagccaatgaagttatcgacggtcaggccactgccctggaagagctggatgatgaatacctgaaagaacgtgcggctgacgtacgtgatatcggtaagcgcctgctgcgcaacatccttggtctggcaatcatcgatctgagtgcgattcaggatgaagtcatcctcgtcgccgccgatctgaccccgtctgaaaccgcacagctgaacctgaataaagtgctgggtttcatcaccgatgcgggcggtcgtacctcccacacctctatcatggcgcgttccctggaattgccggccatcgtgggcaccggcagcatcacggcgcaggtgaagaacggcgactatctgattctcgacgcggtgaacaaccaggttctgatcaacccgtctaacgagcaaattgaagcgctgcgtagtctgcaggctcaggttgcggaagaaaaagccgaactggcgaaactgaaagatctgccggcgattaccctcgacggccatcaggttgaagtctgcgccaacattggtaccgttcgcgatgtcgaaggtgctgagcgcaacggcgccgaaggcgtaggcctgtatcgtaccgaattcctgttcatggaccgtgacgcgctgccaactgaagaagaacagtttgcggcctataaagcggtggctgaggcctgtggctctcaggccgttatcgtccgtaccatggatatcggcggcgacaaagagctgccgtacatgaacttcccgaaagaagagaacccgttcctcggctggcgtgccgtgcgtattgcgatggatcgtaaagagatcctgcgcgaccaggttcgcgccatcctgcgtgcctccgctttcggtaagctgcgcattatgttcccgatgatcatctctgttgaagaagtgcgtgcgctgaagaaagagatcgaaatctacaaacaggaactgcgtgacgaaggtaaagcatttgacgaatccattgagatcggcgtgatggtggaaacaccggctgcggcgaccattgctcgtcatctggccaaagaagttgatttctttagtatcggcaccaatgatttaacgcaatatactctggcagttgaccgtggtaatgatatgatttcacatctttaccagccgatgtcaccgtctgtactgaatctgattaagcaagttattgatgcttctcacgctgaaggtaaatggactggcatgtgcggtgagcttgcgggcgatgaacgtgctacacttctgttgctgggtatggggctggacgaattctctatgagcgccatttccatcccgcgcatcaagaagattattcgtaatacgaacttcgaagatgcgaaagtattagcagagcaggctcttgctcaaccgacaacggacgagttaatgacgctggttaacaagttcattgaagaaaaaacaatctgctaatccacgagatgcgcggcccaaattactgcttaggagaagatcatgggtttgtttgataaattgaaatctctggtttctgatgacaagaaagacaccggaactattgagattgttgctcccctctccggtgagatcgtcaacattgaagacgtgccggatgtggtttttgcggaaaaaattgtgggcgatgggattgccatcaaaccgactggcaacaaaatggtcgcgccggtagacggtaccattggtaaaattttcgaaaccaaccacgcgttctctattgaatctgatagcggcatcgagctgttcgttcacttcggtattgataccgttgaactgaaaggcgaaggcttcaagcgcatcgctgaagaaggtcagcgcgtgaaagtcggcgatccggttatcgaatttgatctgccgctgctggaagagaaagccaagtcgactctgacgccggtggttatctccaacatggacgagatcaaagagctgatcaaactgtccggtagcgtgaccgtgggtgaaaccccggtaatccgcatcaagaagtaatgcttgctgcataaaaatggcgccgaaaggcgccattttttttataccgcgcaggttaccggtcgatagcacttctcgcgagacaagacgcgcaatccctccggggtgctctccagaattcgccgctcgctgtcagcgaccagcagttcgcactgatatccaccggccaggccgaacagcgaccgcgccacgcaggcatcctccagcgccgcctcacctgtcgtatcaaaatgaccaacaatgcgtccctgctggcggatcactaaccgatagcttttcatctgctttgctccagcggcggtaggatcaattcgtcacaaccctgggcggcagtccagttcatcacctccagcacgcgctgggcagcagcctgcgtcgctgcccccagcgccaggccggaaagcaacccgctcaccagctccgcgcagaacagatcgccggttccttttaagtctgtctccacccgcgggtgaaccaccacttccactgcatcggccgtcaccaccagcacattgatcgtcgaatcggcctctcccggcgcgctggtgatcaccacccatttgagggtgtccgacagcaggcttcgcgccgcggcgaccgcctcctgccgatcgcgacagcgctggccgctcagcgtctccagttcgaacagattgggggtgatcccttgcgccagcggcagcaggtgctgacgataggcgtccgggatctcagccttgacatagatgccgctgtcgacatcgccgatgaccggatccaccagaatgcataacccgggatggcgggcccgtacgcgcgtcagccactgcgccaggcgttcgatttgcacagcgctgcccatatagccggtggtgaccgcacgcagttcgcgcagcgcgtcgcgctcctccagcgcctgcagatacccgacaaaccactcttccggaataatgccgccatagaacgtctcataatggggcgtattactgaacagcaccgtcggcaccgccagcacgcgcagaccatgctgtttaatcgccggaaccgcgatgctgttgccgacgctgccatagactacctgcgactgcacggcgacgatatccacttccgacgcccggcttttgtcgtgaaagagcactgattgtatatcatcctgctggcccatcttttctccccccgctggacagcgggtcacgcactgattatgattcgtcctatgctaaattccattttgtcataggtcaataatgttagccggaaaaaccgccagcgaaatcttcgataacatccgccatctggtgcagagcggcgggttgcagcccggagaggttctgccgccggtacgtgaactcgccagccagcttgcagtgaatcgcaacactgtcgccgccgcctataaacggctggtgacctccgggctggccgtcagtcagggacgcaacggtacagccattaaagcgcgggacacactgccggcgctggagggaggtgacccaacgaccccgctgaacgatatctccagcggcaatccggatccggccagactgcctgatttaccccgctatctgggccagattgcccgcacgccccgcctgtatggcgatgcgcccatcgagccgcggcttggccaatgggccgaggcgtggtttgccagagagatagccgttccctttgcggtgaatctcgccagcggggcgatagacgccctggagcgcctgctgtgcgctctgctgctccccggcgacggcgttgtggtggaagatccctgttttctcagcagcatcaatatggtgcgttacgccggttttaccccctgcccggtggcggtggatgccgaagggatggatcctgacggcctggaggaggcgttacgcaacggcgcacgggcggtgatcttaaccccgcgcgcgcataatcctaccggctgtagcctgacggaaacccgggcgcatgccctgcgggaggtgctagcccgctatccgcaggtactggcgattgttgatgaccattttgccctgctgtcggccacgccatggcactcccctcttcctgcaagcacccaacgctgggcgctggtgcgctcgatgtcaaaaaccctcggaccagacctacggctggcctttatcgccagcgatgccgctacttcagcggcgctgcgcctgcggcttaacgccggcagccagtgggtcagccatctgctgcaggacctgacgctggcctgcctgaccgacgaggcgtttatcgcctcgatgacggagacccgtcgtcactatcgccagcagaatgagaaactggcggcggcgctggcccggcacggcttcagccatgctacgccaggggatggcctcaatttctggctgccgctgccagcggcgagccagccctacgccttacgcctggcccgcgccggctggctggtccgggagggagaggtgtttggcatccgtacgccctcccacgggctacgcctgtcgctgggccgtctgagtgacgctgagatttcccgcctggcggccgatattgcgcaggccttagacgccccctgacgcaggcagtccaccgaacgtatcggggaatgatggcagctgccgacaaattaatgaaaaataaacgacagcaggctagtcttacctgcatgccctgatcgccgaggcggacaaatcgctcacaacaaggagcaccagagatgcataacgctgacccggcactgaaagcggtcattgaagcctgcgatcgcgctatctcgcaggaagattacgataccctgatgagttattacgcagaagacgccgcgctggtcgtcaaaccgggcatggtggtcagagggaaagagaatatccgcaaagcctttatcgccattgccgactatttccagcaccgactggtggtgactcaggggaaaatggaggttattgaaggcggcggcaatgcgctggtgattatggagacccggctggatatcccgacggcggacgggatatcccaggttacgcgacgcgccacctatgtctttcagaagcagggcgaacgctggctgtgcaccgtcgataactcctacggcaccgacctgcttgatgattaaatgcccgccccctggctaaagtgttcttcgccgaacacgccggtggaaaggtaacgatcgccgcgatcgcagacgatcgccaccaccaccgcgccaggattttcgcgggctatgcgtaacgcgcccgctaccgcgccgcccgaactgacgccgcagaaaatgccttcccgcaccgccagctgacgcatggtgttctcggcatcctgctgatgaatatccagcaccgtatccaccagcgaagcgttaaagatccccggcatatactctgccggccagcggcggatcccgggaatactgctcccctcctccggctgcaggccaacaatggtcaccggtttactctgttcacgcagaaaacgtgacacgccggtaatggtgccagtggtccccatactggagacaaagtgggtgatacgccccgcggtctgctgccagatttccgggccggtggtggtgtagtgggcgtaggggttatccgggttgttaaactgatcgagcagtttgccttcgccgcgctgggccatctccagagccaggtcgcgggcaccctccatcccctgctctttgctgaccaggataagctcggcgccgtaagcgcgcatcgcggcccgacgctcctggctcatgttgtcgggcatcagcagcttcatccggtagcctttcagcgcggcgatcatcgccagcgcaataccggtgttgccgctggtcgcttcgatcagcacgtctccgggctgaatttcgccgcgcttttccgcttcaacgatcattgacagcgcggcgcgatctttcaccgagccggccggattattgccttcgagtttgacccagacttcgctgccgttgtccggtcccagacgctgaagtttgaccagaggggtattgccgatggtttgttcgagtgtattcacgatttttactcaataaaaaagccgggcggcgcttcgcttacccggcctggcagacgcgtgataattccagaccgggtaagcagagcctcacccggcaaaagcacatggatttaagctatcaggccgactccgccagagcaagctcgccgcgcggctcgatacgctcggtaccgttgtacaaacgcgcgttttgcagcccgacgaacagccgttcgccgcgggacggcgcctcgtcgcccgttaacaccacgctcagcggttcgtcataccaccccagaggctggacgactaattgggtgtagtgccctttcggactggcctccaggacctgcaccggcagcggcgaatccaggctggtccgccggctgatgtccacttcccacgggcgcaggaacaggtccactggcccctggtatgccggggtatagcctaacggccagcggtgggcgccgacgtggaactgtccaccgcggatgaccccctgcaggcggttcacttcccccataaactccagcacgaaacgggtagacggctcacgccatacgcgctccggggcatcggcctgttcgatgttgccctggctcatgaccaccacccggtcggcaacttccatcgcctcttcctgatcgtgggtgacgaacacgctggtgaatttcagctcttcatgcagctgacgcagccagcggcgcagctctttacgcacctgcgcatccagcgcaccgaaaggttcatccagcagcaaaatttgcggctccaccgccagggcgcgcgccagcgccacgcgctgcttctggcctccggacagctgcgccggatagcgatccgccagatgggccagctgcaccatctccagcagtttggtcaccttggctttaatcgccgccgcattggggcgttcgcggcgcggcagcacggtcaggccaaaggcgatgttatcgaacaccgtcatatggcggaacagcgcatagtgctggaaaacgaagcccactttacggtcgcgagcgtgcatccgactgacgtcggtaccgtggaagcggatatgaccgctggtctgatgctccagaccggcgataattcgcagcagggtggtttttccggagcccgagggccccagcagcgcaaccatttgtccggaagggatatccaacgagatatcattcagcacctgggtgcgaccaaacgatttcttaatattggcaatctcaatgctcatgatttccctcctgttgcgcgcgttctttctgattggccagacgccattgcaacatactctttaaaaacagggtcagaatagccattaacgtcagcagggcggcggcggtaaacgagccgacggtgttgtaatcctgctccagtagttcaatttgcagcggcagcgacagcgtttcgccgcggatcgagccggaaaccaccgacaccgcgccaaattcgccgatggcgcgggcgttggtcagcaccacgccgtacagcagcgcccagcgaatattgggcaacgtcacccggcggaacatctgccagccggacgcgcccagcagcaccgcggcctcatcttcatgactgccctgactcatcatcaccggcaccagctcacgcaccacaaacggacaggtaacaaagatggtcgccagcaccatgcccggccaggcgaacatgatttgcagattatgcgcgtcaagccagccgcccagcggaccgttagagccgtaaaacagcagatacaccagaccggccaccaccggcgagacggcgaacgggatatccagcaacgtcagcagcagctggcgccccggaaaggtaaaacgtgtcaccagccaggccagcaaggtaccgaacaccaggttcaccggtacggtaatcaacgcaatcatcaccgtcagccagatggcatgcagcatgtccgggttcgccaggttttccagcaccggcatcaatcctttgctgaaggcctggataaagatgtagagcatcggcaccacaaggatgaaggcggagaccagcatcccgacgccaatcagaaaccattttccccagttgatacggggcgcgtcgtagcgtttcaattgagtaacttccgccattagtgacctaccacgcgtcgaccaaagcgactctgcagggtattgatggaaaacagcagcagcagtgaggcggccaggatcaccgaggcgatggcgctcgccgccggatagtcaaactcctgcagacgaataaagatcatcagcgacgtcacttccgtcttccacgcgatgttgccggcgataaaaatcaccgcgccgaattcgccgaggctgcgggtaaacgacagagcaatgcccgccagcagcgccggcgacagctccggcagcaccaccttgcggaaactctgccagcgcgtagcgcccagcgtttccgccgcttcctcatactcgggccccaactcttccagcaccggctgcacggtgcgtaccacaaacgggatgctggtgaaggccatcgccacggcgatgccgagccaggtataggtgactttaatatcgaacttcgccagccattccccgtaaataccgttcaccgaaaacagcgaggccagggtcagaccggctaccgccgtcggcagcgcaaacggcaggtccattaaggcatccagcagcgtgcggcccggaaaacgatagcgggtcaggatccaggccatcagcagaccaaagacgccgttaaaaatcgaggccacaaacgccgacagcagcgtcaccttataggcggccaccacctgcgggttggtgatcacatcccagtactgcgcccaactcatctgcgccagctgcatcaccagcgcgctgagcggtaataacaaaatcagacagacaaacagcaggctggtgccaaggctcagggtaaagcccggcagcacgcgcttggacgacacagcaaacattacttacgccccgccgccagcagtttgtccagttcgccgccgctggcgaagtgggttttcatcacctcaggccaggagccaaacttatcttccacgcggaacagctcggtctgcgggaatttatccttcagagcatccatcactttcgggttgtttacccgatagtagtagtcggtaatgatagtttgcgcctgtggcgtatagagccagttcaggtaggctttcgccgccttttccgtgccattggctttgacgtttttatcgacccaggccaccgggaactccgccagaatgttggttttcgggataaccacttcaaatccctgcacctcatactgcttgcgaatattattcacttccgattcgaagctaatcagcacatcgccgaggccgcgttcggcgaaggtggtggtcgctccgcgcccgccggtgtcaaagacttcgacgttcttgagaaactgagtcataaactgttcggttttagctttatcgccgccatcagctttatccgccgcgccccatgccgccaggtaggtgtatcgggcgttacccgaggttttcggattcgggaagatcagcttaacgtcagagcgaaccaggtcgttccagtcatgaatgtttttcggattgcctttacgcaccaggaaacccatcgtcgaatagaacggtgagctgttgttcggcagacggctttgccagtcggccgggatcaggttgcctttgtcatgcaggatctgcacgtccgtcacctggttgtaggtgaccacgtccgccttcaggccctgcaaaatagccagcgcctgcttggatgaaccggcatgcgactgcttgatggtcagcttgtccccgccattgtctttcgcccactgctgctcaaaaggcgggttaagggcggcaaacagctcgcgggagacatcataggagctgttcagcagctccgtcgcctgcgcctgcgccaccagcagcatggaagccgccagcgccagatatccttttttcagtgatttaacggccattgcgcacccttatcaacgttgaacattttctgatgatcatcatatttataacgagtacgaaaggagtaacggttttatataccgtttggcgatttggaagtcgaaaagagaataagcaactggcaaagcttagctgaaagcggctcgcagattagacgggtcattgtgacaaacggcagccaggcgtgcactgtgtttatatgaaaaacacacagatatttgctcgtcagctcagacgtagcttaacgcccgcagaacgtcgtccagggtactgactgggcaaccgccgttttgctagcgacacgtttcgccgtcaacaccccgttgccccctatattctcgatttcgcctgctgcgcaatacggctggcgattgaactggacggcggccaacacgatgacgccgcacccgctggcaacagagcgagggatggcgtgttttacgcttctggaataatgagtttgaagagcatgaagatgcggtgatggaggcgatacttgaagcacctgaaccgccaatgccctcacccctcccctctgactgagggagagggagtaaaagaatccgcacgcagatcccatagccgcaccttaccgtcccctctcccctttggggagaggggacggtaaggggaaaaattacagcgcctggatacgctccagcgacggcgcgaaataatatccgccggtcaccggtttggtgaagcgcagcatcgcgtcgcgtttaccgtcggtatcgccaaacatgctcagcagctgctgctcgatgttatacaggcgcgcgcagtaggcgcagaaatagaggccatgggtgccgctggcggtgccgtacggcaggctctgacggacgattttcagccctttgccatcttcttttaagtccacgcggctcaggtgcgacgtgaccggacgttcatcgccatcgatctcttcgttagcgtctttagtacggccgatcatcatctcctgatccggcacgctcatgcggttcagctgtttgagattatgctcccagcgctggacgaacacgtagctgccgcccgcatccacgccgtctttaatgaccgccacttcgcggcgggtttcttcccccgccggattttcggtgccatcgacgaagccgctgaggtcacgctcttccacccagcggaagccgtggatctcttctttcacgtcgatagcgtcgccaaaggcggccagtgcggcctgcgccaccgagaagttaacttcatgacgggcggataaaatatgaatcagcaggtcatactgggtggacggcgccagccctttgccatagaccgggaaatcttttaactcatccgccccttcgccgccgctcagctgacgccagacgttattgccgaacgccaccaccgcaccgagtttggcgtcggggaatttagcctggaaggtggccacgttatcgacaaaaattttgctcgcttcgcgcagggcgttaacgtcccctttgagattggcttcaatccaaatcgccgcgcggcaatgttccggcaaaatgccgctctgaacctgagacatcgctcctcctgaaatgatgcaaccacaacgctgtcgcgttgctaacgcgccattgtaaccgtttttcagagctgtcgtgtctcttcagatcaatttagcgacgccagataatcttgctgaccttccagtttttcagcgtatcgtcggagggcatcagctcgtccggaccgctccagtggccagtgaaggcatagctgatatgctggctcccctcggcctgacactcgacgaccgccccgttgtcatggctgcctttctggcagttgccgaaggctttgctgtacaggtcgctaaacggtgtgccgattttcacgccgctggcggttttgatatccgcatcacgcacgtcaatccggctgatagcaccgttgtcgccattgatggtcagcgccacgctgttgtttttcagcgcttcaaagtagtggacgatattgcccttatcggtcttcattccgctgcgtaaacggtagtcgctgcccagcgcatcgctaatcgcctgttcattgagcggcgtggaagccgtcagtttacccactccctgctcggtcacctcggtggaagcgccaaaccagttccacggataggccgccgaccagttgactgcgctcatcgtggagcagccggtcagcgccagcggaagcgcacagagcattacacgtagcgatttcatatctcaatcctttctgagtcattcaacgcatgttggagttcacgatcggcaaaaagtgccattaaaaggtggtctggtgaaaacaggcgcccaggcgacggctggttaacagccaccacagggcatagccatccgcgaccagcagcgcaatggtcaacgaggagggagattcgccgctcagccatagcatcggctgccacagcaacagcagcacttgcgatagcaccagcagccagcgcatcgcccgccacaggcgcggcaggcgctgacgatagccgctaagcagaaaggccagcaccgccggcacgcctggcagtaaaccaagccagaagcgctcgtgatcgggatagaacagattaagaatcgcgtcgccctgctggcgcgatgcgccggccatcaaaaacagcacccacgtgcgggcctgcaacaacagcacgcaccagaaaagcaaaggcaggcgcagacggccatgggcatcaaaatcggcggggataaactcagtattcttcatcttcgatcagtcgcttgcccagggtcaggacatcggcgtactcatagcccaaccgctcgtacattccctgcaccacgtcgttgtcttcacggaccataatgttgattttcgggcagccgcgggcaatcagctttttctccagacggttgagcagcgcgttcgcgataccccggccgcgatattccggatggacgccgagataataggccgatccgcgatgaccgtcatatccgcccatcaccgtgccgaccacttcgccattcacttccgccaccagaaacaggctgacgtcgtgattcagcttgcgctcaatatccatctccggatcgttccacgggcgcagcagatcgcagcgctcccacagcgtcacaacctcttcgaaatcctgctggcgaaaaacgcgaatctccatggtattccccaccattgacggttaaaaacagtgattatggcgcgaatataactgatagccaatatcaggcgaaatcagcgacaaaaaatggcataatatgactttgtcatgtattgaaatgaaaagtaaaacaattcttattttgaatggtcgtaacggcaaacgcgatacgatataacattggacatcacttgtttacaattcaggccgaatgagcacttttaaacccttaaaaatacttgcttcgcgccgtcaggtgctgaaagccgggctggctgcgatgacgctgagcggcgtcgcctcacaggtcagcgcaaaagaacagccactgaaaacgtcaaatggacatagcaaacccgccgccaaaaaggccggaggtcgccggattgtaatgttagatccgggccacggcggcatcgataccggcgctatcggccataacggctcgaaagagaagcatgtggtgttggcgatcgctaagaacgtgcgcagcattttgcgcagcaacggcatcgacgcccgcctgacccgcaccggggatacctttatcccgctgtacgaccgcgtggagatcgcccatcagcacggcgccgatctgtttatgtcaatccacgccgatggcttcaccaacccgagcgccgccggcgcctcggtgttcgccctgtcaaaccgcggcgccagtagcgccatggcgaaatacctctccgatcgcgaaaaccgcgccgatgaggtcgccggtaagaaagcgacggataaagaccatctgctgcagcaggtactgttcgatctggtgcagaccgacaccatcaaaaacagcctgacgctgggctcgcatatcctgaaaaagatcaagccggtacataagctgcacagccgcaataccgagcaggcggcgttcgtggtgctgaagtcaccatccataccgtccgtgctggtggaaacctcgtttatcaccaacccgaacgaggagaaactgctcggcaccaccgccttccggcagaaaatcgccaccgcgattgccaacggcattatcagctatttccactggttcgataaccagaaagcccattcgaagagacgttaatgaaacccgatgccgcgcaggtaaaaacttttctgctccagctccaggacagcctctgtcagcagctgagcgccgtggatggcgcgccgtttattgaagatgcctggcagcgggaaggcggtggcggcggacgcagccgggtgctgcgcgaaggccgggtgttcgagcaggcgggggtcaacttttcccacgtccatggcgacgccatgcctgcctccgccaccgcgcaccgcccggagctggccggacgcagttttgaagccatgggcgtctcgctggtggttcatccgctgaacccctacgtgcccaccagccatgccaacgtgcgtttttttattgccgaaaagcctggcgccgacccggtgtggtggttcggcggcggctttgatttaaccccttactacggctttgaagaggatgccgtccactggcatcgtaccgcccgcgatctgtgtctgccgttcggcgaggaagtctatccgcgctataaaaaatggtgcgatgattacttctatctcaagcaccgccaggagcagcgcggcatcggcggtctgttctttgacgacctgaacaccccggattttgaccactgcttcgcctttatgcaggcggtcgggaacggctatgctgacgcctatttacctatcgtcgaacgccggaaagccacgccgtacggcgaacgcgagcgccactttcaactctaccgtcgcggccgctatgtcgagttcaatctggtctgggaccgcggcaccctgttcggtctgcagaccggcgggcgtacggagtcgattctgatgtcgatgccgccgctggtgcgctgggaatatgattatcagcccgagcccggcagccccgaggcggcgctgagcgagtttattcaggtgcgcgactggctgtaacggccggatggcggctggccacccggtagcggagtctcttccctcacacccactggcgcaggcgatggtgcagcgtcatcgacggtttctcagcaaacagctgctgatagtcggtggcgaactgccccaaatgccagaatccccactgcatggccgcctccttgaccgtctcgcgctctgaccaggggcttatcagctcccgacgcacggcgttcaggcggatccgtttgagccaggcgttaggaccaatccccagaatcgcatggaaggcgttttgcaaggtgcgacggctgacgtacagctgctggcacagatcgagaacggttaacggctccgcgctgttttccagcacatattcgcgcgcctgcgccagcaggcggcggtagctctggtggctgacgctctctgcacttaccatcggctgcgcttcttccagcatcgtgcccatcgccagcaacagattatcccgcaggactttacgcacggccggctgatgaagggtatccggatgctcgctaaaggtggccagcgcctgctggacaaacccccacagcgcggccttatgcggctcgcggaccgccagcgctgactggttgcgtagcatatgcagcactcgctccgggtggtgcaggaaactggcgtgacgcgcaatcacctcctgcgaaatcactaccccgagaatggtgtaatcatccggcgtgctgagctcgaactccgtaccgccgggacgggtggcgatttctgcccggcccagacactgcgagccgataaaaccttgttcaccccgggtcgccggaatgccaaaccagaaggagttcggccagaccaggcaggactggcgcagcgccagcccggtatattcgcggaagacctggatctcatcgagcaggatttcggtaaactcgccgcgaaactgccccggatgcagctgatcgtagatctgttgccaggcggtaatggtcagggcgtgctcatacacatcggttgtgtgtcgttgatgaatattgtcaatttcaacctgaggcgtcagcctggtgtcttccggcaacgcctcgcaacagagatggtgcaaatttgcagaacgacgctttttcataatcgttaaagccgggggcaagccgctcccggcacctccgacaggttatggatttttgagacgatagcggctactgcgttttcgtagcgtccctgcggaaaagagctgctccagcgcctggcgggccttatccagcggccaggcaaaatgcgcggcgacctcgccggccgtcatgccctgacgaactgaagccagcagcgtcagtaaggcttccgatgaagccgggtcagcaggcggcatgggcgctggcggcggtggctgaaaaccgccgatcagccgctgggtatcctcttccgggcggccaatttcccgacggctgatcacgcagccggtccgccgggcagcggcggccccggcatccagcgcggcgcggcaggccgccaggtcgccctccaccaccagcgttaacctgcccgggtcgagcacttcatgactgagcaggcgcacattggccgccttaagcatggcatccgcagcgtctacagccgcgaccatgccctccacttcgagcaatcccagcgcattgatcatcgctccctccattacgcacgctgtacaggatgacgggcaatatcgagaacggcatcggtaaaggcattgcaggcggctttacaggcggcctggcttcccgtcaaaaaggcggccgaatagttggtttccgatggcggcgggacgtaggtcaccagctgaacgtcggccgacttcatcgccgcatcgataccaaacgtcgcctccagcggcggcgccaccagataagcaatcggatcgcccaacgcgatgccagcggccgatgaaagataagagccggtacgcgacaccacgtgcgccagaaaggcggtatcttgcgcgtcgttagcccactggaatgccgccccaccttcaatatgcgccatcatggcatccagcccggcgcgaacttccgccgggttcgggccgccaagcatgatcagtacttcgccggcggtaggcgacggaccatgggccgcaccggcgtagagggagcggccatagaccacctccaccatcgcctgctttgtcgcttcgtcggcggcaatatacgtcacatcgtcagaatctgccgtgatgagtccgaggctacgtatatgcgacggtaatttaagctcgcgcgcgaaaccgtcattcaccgaggcaatcacgcgcatcgcggtaaccgagggtcgaatcaaatctaatgctggcatgatgcctccttaacggctcatgttgatgccggaggctttctgctccagcatgcgtttggctaaatccacgatcaccgcggcggcttctaccggcggggtgccgccctggtggatattggagatacaggtccggtcggcctcgacggtggtcgccacccgcggggagtacaccgcgtagcaggagaggctctccgactggccgagccccgggcgctcgccaaccagcaggatcaccaccttcgcgccgaggatctcgccgatctgatcttcaatcttgacgcggccatagcgcacgaagaacggcgtcccgaccttcagacccgcctgtttcaggccggcaagcagcggcggcaggatctcttcgtagttggcggtgatggcatccgtcgacaggccatcggagaccaccacctgcacatccggatccatcacgcactgcgccttcagcgcatcaatcgcttccggactgaggcgacggcccatatccggacgcgtgaggtagaggttcttatcgctaatctcggaacgcacttccagcagcccctgcgctttcacccacgcttccggcacctctttgagcaccgtgtctttcgagcgcgagtgatcggccaggaagcgcagcagcgcctgagtgcgcggacgcgggccggcgcggccggtgcaaacgcgcgccgcggtactgcgtttcagttcagtcagtacttcggcgcggtgcggatgttgtaccccaatccaggctttcgcttccgctgagcccaggtccagcgcgcagctttccaccaccgcttcgctggcgcaggcggcatggcaggccggcgtcgacgctgcgggggcctgcggctgcgactgtggttgtcccatcgacgccattacgctgcgtacaatgtcttcaatctgtttttgatccatgatgtgtcatccccgcgtcatcagaagaacagtgacggatcgcccgcccgtttggtcaggcgaccatttgccataatgcccatcgtttcgagccagcgttcaaactccggcgacggccgcaggcccagcagttggcgcacggtcgcggtatcgtggaaggcggtggtctggtagttgagcatgatgtcgtcgccgagcggcatgcccatgatgtagttgcagcctgcggtcgccagcaggatcatcaggttttcgttgaggttctggtcggcatcggcatggttggtatagcagcagtcgcagcccattgagatgccgctcagcttgcccataaagtggtcttccagtccggcgcgaatgatttgccggtcgttatagagatactccggcccgataaagcccaccacggtgttgacgaggaacggatcgtagtgccgcgccaggccatagttacgcgcttccatggtcacctggtcggcgccgaagttagcgccagcggaaagcgccgagccctgcccggtttcaaagtaaagacagttctccccggcgatgcggttaaactccgcccccaccgcccgcgcttcatcgagcatcgccagctcgacgccgaactctttaagccctttttcactgccgcagatgctctggaagataagcccccccggcgcgccgcggcggatggcttcaatctgggtagtgacgtgcgccagcacgcagccctgggtcgggatgttaaacttgtcgatcaccccgtacaccgtatccagcacccggctcaggttctccacgtcgtcagtgaccgggttgacgccaatcaccgcgtcgcccgcgccgaaggagagcccttcatagatttgcgcggcaatactctgcacgtcgtcgcgggtatcgttcggctgcaagcggcagctaaaggtccccggcagaccgatggtggtattggcttttttgatcaccggcatttttttaccgccgtagatcagatcggcgttggagcagatcttggccaccgcagccaccacctcggaggtcagccctttgcggacaaaggcgatatcgtcgctggtgacctcgtcgttgagcacgtattcccgcaggtcgctgatggtccagtgtttaatccgctgataggcggtttcgttcacgtcatcctggatcaggcgcgtaacgcagtcctcctcatacgggatcaccgggttattacggatatcggccaccgtcatatcggagagcacctgcttggcggccacgcgctgctgcgaactctccgccgctacccccgccagcacatcccccgaacgcagttcgttggctttcgccagcacctcttttacatccttaaactgataaacattgccgaacaatgtggtctttagtttcataagtcgttccctcaggaaggaaatgcgagtgatttcaccgtcaccggcacaaccgatccgccaaaaagaggcgtaccaatgtcgatatagtctcccgcccggatgctcacctcatcgatgaccgccagcggaaggtgtggaagctgtggccgcagcagcatgcccagcgctttgccaaaatcctgctcggccaccagcagcagcggacggggattgggaaagcgggcgacaaacgccagcagggcgtcaattacggtcagtaaggtggcgtagcgcaccggaagtgaagcgggaagcgccagcacgtaagcgtccgcctcgggagccagatcgagctgcgtcagcgcctggagccaggcgttcggcagatcggcggcatcctgcgggatagccaccggcagattgcgcagcggcaatggaaccccctccagccagatggtgctcccggacagggacagcgtatgcgccccggcgccaatcaccgtggcgcgcacggtttgcgccgggaactgcacgttcatctcacgcaggcgcggatgctcgtgcagggccgtggccagcagcggcccgatatcggaaaaacagaaaggatcggcgggctgatggcggtagcactcccccactccgccggaaagggtaatcacctccggctgaatacccgcaggcagtacttcggtttgcatcagcccctgcgccagcggtgagagggtgccgtcgatcacctcgacgatcagcgccgccatccggcgcgccacctgcgccagctgcccggcggtcagcgccagggcgttagtgccggcgccaaacagcgcatcgacaatccgctgccccggcgggtgcgcgtggaccacgcgcccctgagcgtcggtttccagcaggcggccgccgacgttgaggcaggcggtggcgctgacgtttccggcgtcaaacagggcatagttcgaggtaccgccgccaatatcgatattgagcacccggcacatccgctgccgggacagggtctgcgccccggcgccgtgtccggcaatgaccgactccagatgcggcccggcgctggcgacgacaaaatcacccagcgactgcgagagcgccatcaccgccgggcgggcattgcgggttttcgcgctttcgccagtgatgatgatcgccccggaatccaccgcttgtggagcgatccctgctgcccggtactgagccagaatcagcgcctcaagctcggcctctttcaattctccctgcttatcaaccggcgtaaagaagaccgggctttgccagctaatgtcgcgtttgatgaattcataacgcggcacctgggaaaccgccgcgcggttcaccagctcgaggcgcgagaagatcacctgcgtggtggtggtgccgatatcaataccgacgctcaacagctggcgcgtgttcacgagtgcgcctccgcttcgttgttggcaggcgccggtacgttttcatcttttggcaccagcagcatcgccacgccaatcgcggtaacgccgccgaccagcttgccgacaatcatcggaaagatcatggcgttcatattggccgccgcaaaaccgagatggtcgccgagggcgaacgccgctgacaccgagaaggcgcagttgatcactttcccgcgggtatccatctgcttcatcatgccgaacatcgggatattgttcgccagggtagcgaccatgccgccggcagccatattgttgatttttagcagattaccaacgcgcatcagcggcttttcaaaccagcgggtcagcaggagcaccatcggataagcgccgagcagcacgcaggagatagagccaatgacttcgatggcgcgcatcacctcgccgggctggtcgccaggcgccataaagatcggatcgagccccgggatcagctcccagccgagcaggaacttgatcaccgccgccgccaggccgatggtgatcagcgccacgaggaatttggcgaagatctggaagccgttgatcattttttccggaataaacttcagccccagcgccaccagcacggcgacgatgatcaccgggatcatattcatcaggatcagcgcgaaggtaaactctaccggctggccgttgatctccaccccggaatacatcgccaccagaccgccggcgatacagccgatgggaatggtgacaatgcccgccagcacgccgagcgccagccagcggcgatcggttggttcgataatgccgagcgccaccggaatggagaacacaatggtcggccccatcatagagccgaggatcaggcctgagtacatccaggccgccacgtcgccgcccgcgagttctttagcgaggaagaaaccgcccatgtcgcacgccagcagcgtgccggcgaacatcgacgggttggcgccgagcatctcatacagcggaataatcaccggaccaagcagatgagccagcactggcgccagggcggtcatcccgaccatcgccaggcccagcgcgcccatcgccataaacccttcttcaaactgaccgccggatccctcaatgcttttccccagtttgccgagaaagcgcgccgagccgccgaactgcgacaggatcctgtccacggcggcaatcagcataaagaacatcatgatgtacatgatgatttcgttaattcccatagcccttactccctgtcatttatgatttgtagatactgtgaataccgggacattagccgcactcaggcgactttcccgggccgcggcgtgaacgccttacccgggctacggcatagcagacggctgtgatcctgtagcccggctaagcgcagcgcgagccgggaaagccacagccacacgcctccgggaaaatcggcatttatcgcgccgccgcgtacagctcgataatctgctcccggctggcggtgcgtggattggcgcgcaaacagatgtcctcctgcgccgcttgcgcccaggcggcgtagtgcgcggacgtcgcgccagcctccgtcagccgcatcgtcagaccgacctcggcgatcagctcgcgcacggcggcgatagcctcgcggtcatcggttttcttgccggttaacgcccggccgatctggctgaagcgcgcccggcgcaccatgcggttaaactccatcaccgttggcagcagcatggcgttggccagaccgtgcggaatatgcagcgccgcccccggctgatgcgccatggcatggcatagccccagcccggcgctggaaaacgccatccccgccatgcaggaagccagcagcatgttctcccgcgccgccagatcctgaccgcagcccaccgctttcggcagcgcctcgccgatcatggctatcgcccccatcgccagactgtcggtaaacggcgtggcgtggcgggcgctgtaggcctcgacggcgtgggtcagcgcatcaatcccggtcattgccgtgatatgcggcggcacgccctcggtcagcgcggcgtcgaggatcgccacatccggcatcagcgaggcatgcgccagcacctgtttgcgtccactcaccgcatcgataatcaccgtcacattggtggtttcagacccggtgccagcggtggtcggcaccgcgattagcggcagacgtggacgcaactcgctgtgctccgtcatctcccccagcgtctgctcaggattggcgaccagcagtgccaccgccttcgccgcatccagtaccgatccaccaccaaaggccaccacgccgtcgcagcgcgcgtcccgcagctgggcgacggcggcgcagacatcggtgacgcagggttcgccggcgggacagggccagagagtcatagcaatccctttcatcgccaggctacgctccagcccggcggtcattcccgcctgatggagaaaactgtcaaccatgacaaacagatgcctaaggccccgggactgcgcttgcggaccgcaggccgccagcgcgccgacgccgtgcagcgtcaccggcggaacgttgaagcttttcatttgctgaagattcaacgtatcaaaggcatggaacagcgccgtctgcagttcagcttgcatacatcccctccgctttttccctcccgctgttggcgattgccagcggggtcataaacaggctgtgctgcggcaaatgcaccggtaatgccgggaagcgctgacgaaacagctcatgcacgcccggctgcatacaggcgccgcctgccagccacaaatcgacaatcccttgtccggcaatatgtcgggcgacaatttcggccatcttctcgtacaccggcttaaccaccggccagatctccccggcgtggctgcgcttgtactgctccgcctcctcaagcccgatgccgcgattcccggccagagtcagggagatatggtggccgccggtggcttcatccgccgaatatgtcaccctgccctgtttaacgatggcgatcccggtggtgccgccaccgatatccaccaccccggcgttatcgagctgcagcagatcggccaccgcggtaggctcatccagcacatgactgatctccagcccggcggactccaggacattgatcgaaatgcgcggatcggtgccgggcggaaacgaggtcgccgcatgggtgaagcggcagcccagctgctgctcgagagtcgcaagatgtcggcgcacgagggtgacggcgccaaaaaaatcccagacgatgccgtcgcgcaccacgtcggcccagtcaaggcataccgcaaccggttggccgtcacggtcaaccaccatcgacaccacgtcgcaggtgcccaaatcgatgcccagccacagcggcgactcgctggcggcgggcgcctggttacacagggcagcggctttttgtagtctcggcgaaagccagcgttgttcgtcgtgcgccatgttcatcctttatacgattcgaaacgcatccaccagcacgcagcggcgcagacgaacgaaggtccgcgcgctggtcaccccttccccggttggggtggtgatggtcatggtggtccagccctcgccgcccagcccaagcccggcgatgcacggtccgtttttgacgaagatgctggtgtcgatggcgttcgccatctggttcatgttgtcgatgttgcgcgagtgcatcgccgcggtgtggtggcagccgccttccagttgcaccgccagggcgatggcctcttcaacgttcgccacccgcaccaccggcagcaccggcatcatcagttcagtaacagcaaacggatggctggcgggggtttccacaaacagcaggcgggtttgcgccggtacctgcaggccaatcgccgcggcgattttgcccgcgtcgcgaccgacccagtcgcggctgaccgtgcctttgccgcgctcgtcaatatttttcagcagcagcggctggagctgttcggcctgcgccgccgtgagtttcaccgcctgctggccttccatcaggcgcatcagttcgtcggcaacgctatcgaccacgatcagcaccttctcgtcggcgcagataatgttgttatcaaaagaggcgcctttgacgatcgcctgcgcggcgcgcggtagatcggcagtctcatccaccaccaccggcgggttgccagccccggcggcgatcaggcgtttgttggtatgtttgcgcgccgcctcgaccaccgcttcgccgccggtcaccaccagcaggccgatgccagggtacttaaacagccgctgggcggtgtcgatatccgggttcgccacggtcaccagcaggttggccgggccgccggcggccactaccgcctggttaagcagggtaattgccctttgcgagatctttttcgccgccggatggggggcgaagaccacgctgttgccggcggctatcaggctaatggcgttgttgatcaccgtcgccgccggattggtggacggcgtcaccgaggccaccacgccccagggcgcattttcaatcagcgtcaggccattatcgccggtgagcacctgcggagtcagacactccacgcccggcgtgccgcgcgcctgcgccacgtttttggcaaacttatcttcaacgcgtcccatgccggtctccgtcaccgcaagctccgccagttcacgggcatacttttcacccgcctcacgaatggcctgaatcacctgctgacgcatcgccacccgctttaatccctgctgggccaccgttgccgccgcgacagcgtcatccagtgaggcaaaaacgcccatatcatgaacggtgccggcaggctggctgctgtctttcattttcagcagtaccgctttcactacctgttcaatgtcctgttgattcatgatttttcaccctacttatggaagagcacctgaccatcggccgcagcctcatccacgataccaatcacgcacagatcgaccggagaggcgccgtgtgcgtgcgcctgtcgcgccgagctgccgctgaccagcagtacccactctccgcatcccgcgccgatgctgtcgatggcgaccgcacattgcccgtcgggctcgccgcgggcattgagcatctccaccatcagcagtttgtcgtgggccagaccttcatggcgtacggtgcagaccacatatccggttaccacagccagcttcatgtccgtctccgcgtgtgatgtgcaggccggaaaagcgcaacgccatccggcattcatgccttttcatggccggatagcgacgcgctggcgtcttatccggccagaactttccggccccccctcccccgttagatgttgctgtcgcccttgaagctaatcgggaagacctcttccagatcgccatgcgggcgcgggatgacatgtacagagaccagctcaccgatacgctgagccgccgccgccccggcatccgtcgcggctttgcacgccgcgacatcgccgcgcaccatggcggtcaccaggcccccgccgatctgtttcactcccaccagcttgacgcgagccgctttgaccatggcgtcggaggcctcaatcagtgcaaccaggccccgggtttcaatcattcctaatgcttccattgtgttttcctctcataaggggtcctgaaggggaccattcattcaaccagcgtggacgagtcggggatccggcttgcgtccgtctggcgcggtaccgacgccaccagcgccagttcgataatttcctctacgctacagcctcgcgagaggtcgtgaagcggggcggccaggccctggatcagcggcccgatggcgcgatatccgcccagccgctgggcgattttgtagccgatgttgcccgcctccagcgacgggaagaccagcacattggcccggccctgcagcgggctgccgggcgctttgtgcgcagcgacgtccggtacaaaggcggcgtcaaactgcagctcgccatcgaccatcagctgcggcgcccgctgacgcacgatctccgtggcctgctggacgttagccacacagggatgccgggcgctgccgtgtgtcgagaaggacagcattgccacccgcggcgcttcgccagcgatcgcttgccaggtctcggcgctggcaatcgcgatatccgccagctgcgccgcggtcggctgcggcaccacgctgcagtcggcaaaccccagcggctgtccggtatactgcggcagcatcagaaacagcgaagagagcgttttacatcccggctgcaggccgataaggcgcagaccagcgcgcagcacgctggcggttgacgagagatttccggcgatacacacctcggcctgcccggcgctgaccatcgccgcggcgaacatcagcgggtcggccagcttgtcgaccgcgtcagcgggcgctttatcgccggcgcgcgcctgccaggcggcggcaaacgcctcgcgcatcgccaggttgctgtgcggatcgatgacctgcaccccggtcagcggcagacgttcgccaagggcgaactgccgcagcgcgaaggggctggcgacgaggatcggatgcgccaggccctgctgctgcagataatgcgccgccttcaacacgcggacgtccagcgcatccgggaacaccaccctggcgggggcgcgcagcgccagtttgcgacactggtcaatgatcatcttcacctcccagctgctgctgtagctgcctgagggttggcggcgaatccgtcacgcccaggatcatcatcacgtagaccgcgctggagaggcggttgagcgcttgcataatatcggcgcgctggaccgcaaattgcggcgtaataaacacctgcgccgcggtcacctccgcctcgcgcactttgccgcgcagcaaattaagcagcgcgacatcgcgcccatggcgggcctccggcaccaggtgatcgtgacccaggtaacgcagcggctgatgggacagacgatgcagctgcgcctcgctgaatccggctatcgactgcgccgccagcggttcctccagcgcatcggcgcgcatgatgttgcccagccgcgaacggatatccgtcagccacggctgccagggctccgccagttcaatttgcagccacaccgtcagggcgatggtgctgtccagcaccgcgcggaaggccagccgcggatcgtttttcgccaccagggtatcggccgtcagatgagttaaggtgtccggctttttgcccaccggctggtgacaaagctcgcagcaggcctggggcggatggtcgctgctggtcaggacatgcaccggctgcggcgtctgttcgtcatcctcgacaaacaggcgcccctggcggtcgagaaatttgacccgcagatgccgactttccagcagttccctcgccgagggcgtcaggcgggcatcggcaggaagatggatttcaccgccttcgctgagcgtatgattcgctctgagccacgcttcggtaatgaaatcgttcatagcgattgccagtttgccggccaggcgacgtacaggaagcgcaccgtcgacggggtaccgaattcgatgctggagcctttcgggatgaacacgacgtcccccgctttggcgaccagcgtttccccctgatggcgcacatgcagctcgccctccagcaccatatcgatttcgtcgtagttcagcgtccacgggaagaaggcgttctcccactgcataaatccggccgccatgctgctgccatcctggtcagtcaccaggtccgttaagccaacgcagtgcggctgggcgccgtcgaagcggccaaacttcacgctgctgccgtcgatcactttgatgccgcctttgccggtcacggagtcaaatcccggctgcatcgcctcctgctccagggactgcttctccttcatcaccttttccatcagctgcgccaccaggctttcggtaaactggccttccggcagctgcgccaggatggtttcccggatccgctggctttccgttttgtcgctgtccgccgctgtcgccgccggcgcggcgccatcgtcttcggtgatagtgaatcccagcagctcggcgacttcgcgcgcttccggggtgataatgctggcgcgcagaactactgacatcgcctgttcgccgcgcgcgtgggcggcacgaatatcgttagcggtaatgagtttcttcacctggcccttcctccttttggctgagctcactcaagtaattttccagcggcgcaacgctttgcggatcgcaaccgttgagggcgaaaaccggcgcctgaaaccccatcccgtccagcagctgccgcaccgcggcgacattggcatccggcagatccgttttgctgatcgccacgataaggtgctttcggctgccaatatccagcaacccgggtggcaggcgactttcggtatcattggccgcatggacataaatcagggtgtccacatcctgcaaggtggtaattaaggcgtgataccagcgcggatggctgaaatattccccgggtgtatcgatgtcgccacgatcgttaaattccagcgcctgcgtttttctggcgagggaataattcccctgcagggcattaaataacgtggtttttcctgcaccgacggcgccgacaatcgcaatacgcttcatggtcgctctcaattaacttttcgttaattcgcacaaggtataatttaataagcggcctaatccgccgatggtctgcagaagcgcctcctccaccgcgccgaccgagccgtagatcaccagcgcgccgctaaaccggtcgagaaaaccgatgtgcacgtcggcggccttcatcgccagatcgccggcgatcatcgccgtttctcccggcgtcagcgtcataatgccgatcgcgccggattcgggtacgccgatctttttcgccagctccgctcccgggtgggcaatcagatgcgccagcgtgacctgtttgcctggtacgaattcctgaataatgcgttctttatccatgactgattgccccctgaaatctgtcctcatggtgacgacatttcagcgcggcaaataacaaatttcggcaagtggggttaaaaggtgaagtggatcactcaggagagaaaataatattgcggcggaattaaaaaggcaggctcagcgttttttactcaccggcctgcctgatattgcgcgcggaaacggatccgcgcgttaacgggggaaatagaaaattacagcggttcggtttgcgcttcgacaaccgccagcgccaccatattgacgatgcgacgtacggaggcgatcggcgtcaggatatgcaccggcttcgccacccccatcagcaccggcccgacggtcaccccttccgaactggagacgcgcagcaggttatagctgatccgggcggcttccatattcggcatcaccagaatattggccgcccccttcagcgggctgtccggcatgcgatcgttgcggatgctttccaccagcgcggcgtcgccatgcatttcgccatcgatcatcagctccggggcgcgggccttcaccagctccagggttttacgcattttgctggctgacggacagtcggcagagccaaagttggagtgcgacagcaacgccacgcgcggttcaataccaaagcgtcgcacgctttccgccgccatcagggtgatctccgccagctcttccggcgacggatcgtgattgacataggtatcggcgataaaggtgttgccgctcggcagcagcagcgcattcatcgccccggcggtgctgacgccgtctcgatagccaaacagcggctgcaccacgcggtagtgatcgtggtactcgccaatagtcccgcagatcatcgcatccgcttcaccgcgatgcaccatgatggcgccaatcaccgtggtgttgctaatcaccgcccgctgcgcctgctcctgggtaatgccgcggcgcttcatcagctggtagtactcgctccagtactctttaaaccgcgggtcggattcattattgacgatctcaaagtcaacgccggccttgatctgcaggcccagcttctggatgcgcatttcaatcacgctcgggcgccccaccagaatcggtttggccagccccagcgacaccagctcctgagtggcgtgcagcacccgggtctcctccccttccgccagcaccacgcgcttcggctctttgcgcgcctgagagaagataggcttcataaacaggttggttttatagacgaactcgctcagcttctcgatataggcgtcaaaatcagcgatcgggcgcgttgccaccccggaatccatcgccgccttcgccaccgcgggggcgatcttgacgatcagccgcgggtcgaatggcttcggaatgatgtactccggaccaaagcttaaatcctgatcgccgtaggcggaggccaccacttcgctctgctcggcatgggccagctcggcaattgcatgcaccgccgccagcttcatctcttcgttgatcgccgtcgcgccgacgtccagcgcgccgcggaagatgaacgggaagcaaagtacgttgttgacctggttagggtagtcggagcggccggtacagatgatggcgtcatcgcggacctgcttcgccagcggcggcagaatttccggctccgggttggccagggcgaggatcagcggcgcccgcgccatcttcttcaccatctcctgagtcagcacttttggaccggagcagccgaggaaaatgtcggcgccgtcgatcacgtcatcgagggtgcgtttgccgtcgtcttccaccgcataggcggctttggtttccgccatgttcggctcacggtctttatagataacgcctttcgaatcgcagaccacgatgttgtgcttttgcatccccagcgccaccagcagattcatacaggcgatcgccgccgcgcccgcgccggagaccaccatccgcacgtcggacagattcttctcgacgacgcgcagaccgttgaggatcgccgcggtgctgatgatcgccgtgccgtgctgatcgtcatggaagaccgggatattcatccgctcgcgcagctgctgctcgatgtagaaacactccggcgctttaatatcttccaggttgataccgccgaaggttggttcgagggcggcgacgacgttaatgaatttgtccggatccagctcatcgacttcgatatcaaacacatcgataccggcaaatttcttaaacaggacgcctttgccctccattaccggcttaccggccagcgcgccgatgttgccgagccccagcaccgcggtgccgttggagacgaccgccaccaggttgccacgggcagtgtatttgtaggcggccagcggatctttttcgatttccaggcagggggctgcgacgcccggcgagtaggccagcgccagatcgcgctgggtggcgagaggtttggtcggcgagacctggatttttccgggaaccggaaattcgtggaagtcgagggcgctctgttttaactgctcatccattttctattcctttctttcacgtatcgttcgtaggggaaaagcgtgatgaccatcctgtcgttcacctttcagtggcagacagtatccctcctggcggggcgataaactttgaacaccgccaaactctggccatcgttatgattttgttgttatcaatttatagcggttatgttacccggattcgccgccaataatagccctgtctgctatgctttttggttatgtacctcatcaatgtttataccgtataccggcaagcactcatgtaacaccttgttccaggaggacttatccatgaatcagttagacagcatcaagcagttcaccacggtggtcgccgacagcggagacatcgaatccatccgccactaccatccggaagacgccaccaccaacccctctctgctgctgaaggccgccggcctggcgtcctatagcggcctcatcgacgacgctatcgcctgggccaaaaaacagggtggcggccgcgaagcgcaggtggctcacgcctgcgataagctggcggtcaattttggcgcggagatcctcaaaagcattcccgggcgggtctccaccgaggtggacgcccggctctccttcaaccgcgagaaaagtatcgagaaggctcgccacctggtggcgctgtatcaggagatgggcattgataagtcgcggatcctgatcaagctggcatccacctgggaggggatccgcgccgcggaggtgctggagaaagaggggatccactgcaacctgacgctgctgttttccttcgcccaggcccgggcctgcgccgaggccggggtttatctcatctccccgttcgttgggcgtatttatgactggtatcaggcgcgcaaaccgctggagccttacgtggtggaggaagatccgggggtgaaatcggtgcgcaatatctatgactatttcaaacagcataaatacaacaccatcgtgatgggcgccagcttccgccgcaccgagcagatcctggcgctggtcggttgcgaccggttgaccatcgccccgcctttattaaaagagctgcaggccagcgataccccggtggtgcgcaaactgatccctgccagccagatcctgccgcgtccggtgccgctcagtgaagcggagttccgctgggaacataatcaggatccgatggcggtcgaaaagctagcggaggggatccgcctgttcgccgtcgatcagcgcaaactggaagatctgcttgccgccaaactgtcactttagtctcacggagaaaaatatgtcccgaagagagcttgccaacgccatccgcgccctgagtatggacgccgtgcagaaagccaactccggccaccccggtgcgccgatggggatggctgatattgccgaagtgctgtggaacgattttctcaagcacaatccgcagaaccctgactgggtggaccgcgaccgtttcatcttgtccaacggccacgcgtcgatgctgctctacagtctgctgcacctgaccggctacgatctgccgctgtctgaactgaagcagttccgtcagctgcactctaaaacgcccggccacccggagcatggctatacccctggggtggaaaccaccaccggcccgctgggccaggggctggcgaacgccgtcgggatggccatcgccgaacggacgctggcggcgcagtttaatcgccccggccatgagatcattgaccatcacacctgggtgttcatgggcgatggctgtttgatggaggggatctcccatgaggcctgttcgctggccggcacgctcggactgggcaagctgatcggtttttacgatcacaacggcatctccatcgacggcaaaaccgaaggctggttttccgatgatacggcggaacgcttccgcgcctatcactggcacgtcataggcgatatcgacggccacgatccgcaggctatcaaacaggcgataacggaagcgcaggcggtgaaagataaaccgtcactgattatctgccggaccatcatcggcttcggttcgcccaacaaagccggctcagaggagtctcacggggcggcgcttggcgaaaaagaggtagcgctagcccgccagcagcttggctggaaatatcctccgttcgagatcccgaaagagatctacgcgggctgggatgcgcgtccgcgcggggaaaaagcggagcacgcctggaacgagaaattcgccgcctaccagcagcagttcccggagctggccgctgagctgacccgacgtatgaatggcgccctgccggaagactttgccgcgaccgcccgcgactacgtggcgaaactgcaggccgagccggcgaaaatcgccagtcgcaaggcttcgcaaaacgcgctgaacgcctacggcccgcaccttccggaactgctgggcggttctgcggatcttgcgccgagtaacctgaccatctggtctggatcgacatcgattaaagaagatcctgcgggcaattatatccactacggggtgcgcgagtttggcatgaccgcggtggccaacggcattgccctgcacgggggctttattccttatacctcgaccttcctgatgtttgtggagtacgcccgcaacgccgcgcgcatggcggccctgatgaaggcccggcagatcatggtctatacccatgactcgatcggtcttggggaagacgggccgacgcaccaggcggtggaacagctggccagtctgcggctgacgcccaacttcagcacctggcgcccctgcgaccaggtggagaccgccgtcgcctggcaggcggctatcgcgcgacagggcgggccgacggcgctgatcctgtcgcgacaaaacctggcgcagatgccgcgtaccccggaacaggtgcaggatatcgcccggggtggctacgtgcttaaggatgccggcggaaaacccgacctgatcctcatcgccaccggctcggaagtggagatcaccgtcctggccgcggaaaaactgttggccaaaggggtaaatgtgcgggtcgtctcgctcccttccactgatgtgtttgacgcccaggatgaggcctggcgcgaatcggtgctgccgtcggacgtcagcgcccgggtggcggtcgaagccgggatagcggactactggtataaatatgtcggcttaaaaggcaagatcgtcggcatgaccggctatggcgaatccgccccggcagagcagttgttcccgttctttggctttacggtcgaccatatcgtcgccaccgccgaacaggtgcttaacgggtgatccacagcgtgggccaggcatctggcccctgccagttgtcgcacgtcggctgctgcgcgtagcgggagaggctgaaccgctggccgtcaaaacgccagcgggtttggatcccgcaatcgccggccccgcggcctttatccagggtcaccagctcatggcggcggtcatcatagctggcgttgatcagctcaatctcacgcggcgcctcgcccggcggctgaaatggcaacgttagccgcacctgacgggcgacataggggcgctggcgggagaccagccaggccagccagacggtgttgtaggcgccggattcgcagctggtcatcagcagcactttgtcatccgtcagcgcagtaacgcgaatttcacggcggaagggatcgagggagcagtggctgttggtcatccgctcattaccgtagtccatcagatcgttgagctcctcacgccccagcggcgactgcgccgtttccgcgctcgccaccgcgcgcagcgccggcgccggcggtacgctgagcggcggctcttcccctttgccgacccaggccgtttcgctacctacccgcttttgccgatcgtcgataaaaaacagagccgctttcaacccctgcagggagatggtctgcaggccattggccagcgagagcgctttaccctcctgaacctgctggagaaacgcatcgatcgtcacgctgtcggcggttttaatgagcttatcttcaatgtgccagcgcttgtcggtcagggacagcggtttaccatccagcagcaggcgcggcgctatcggcgcgagcgtcgccactggattgccggtgccgcccagctcgatacgcagactggcgtcagtgactgccccagcgctgcggctgagggtcatcaccaggccatgatgcagccccacgttacgggtgacgcagaaattttggttgttacaggtgaccagccagtcgttgaagcgctgctgcgtcggtgccgaccatgcctgcgagcaaggcagcaccgccataaaaaggaaaaagatgacgcgaaaaagcatgaaccgcccgaccccagataaacccgaccacggcgcctatcctggacaacggcagcgggttactcaatcggatttgtcagagttccccgacatcaggccggaggtttgcagatattgcagcagaatgaccgccttaccgtcgcggatctccccgtcagcgaccatctgcagcgcctggctaaaaggcagctccagcacctcgatggcttcatcatctaccccgccgccgctggtggttcgctgcgcgtcgctgtactcggcgataaagaaatgcactacctcggtgacgccccctggcgacataaacagctcaaacagctttctcacctcgcccacttcgtagccggtctcttccaccgcctctttacgaatgcaggcttccggctcgtcgttgtccagcagcccggcgcaggtttcaatcagcatgccgtcatgattgccattgacccaggtggcgacacggaactgacgcaccaggaccaccgtctgcttatggcggttatacagcagcacggtggcgccattgccgcgatcgtagacctcgcgcttgtggcgcacgacgctgccgtccgcccgcgtcagctcataggtcatgttgcgtagtacgaaccagttctcagagaggattttatctttaatgacgtgaatattgagtgacataccgaccccacagcgtaaaaggacgccctcatactacgctgcggagccgggtttgtcgtcagtgaagcggcgtcgttttccgcgccagatagtccaggatcccctgcgccgcgtgacggccttccgccatcgccgtcactacaaggtctgcgccgcgcacggcatcgccgccggcaaagatcttctcctgactggtctgataacggtaacggctctccactccggctttaatacgcccctggctgtccagcgccacccccgccgcctccagccagggcatgcggtgcgggtggaagccaaaggccatgatcaccgcatctgccggcataacaaactcgctgccggggatcggcgtcggacggcgtcttcccccggcgtccggagcgcccagctcggtgcgcaaaaagcgtaccccgttaacccgcccgttctcgtccagctcaagcgtcaccggctggacgttaaactcaaagagcgccccctcttcgcgggcgtttttgacctcttttttcgagcccggcatgttggcttcatctcgccgataggcgcaggtcacctggcgggcgccgtggcgcagcgcggtgcgcacgcagtccatcgccgtatcgccgccgcccagcaccaccacgttcagcccggcggtgttgacataaggctcttgcgccgatgccgccagccccatcacctgtttggtgttggcgatgaggaacggcagcgcatcgtagaccccgggggcctcttcgttcggcagccccgccttcatggagcgataggttccggcgccgacgaacaccgcgtcataatcggccagcagtgtcgccatggagatatctttccccacctcgcaattgagctcaaagcggatacccatctcgctgaagatcgcccgccgccgggccaatagcgatttatccagcttgaacgccggaatgccgaaggtcagcagaccgccaatctccggatgacggtcgaagaccaccggctggacgccgtggcgcaccagcatatcggcgcaggccagcccggcaggaccggcgccgataatcgccacccgcttgccgctcggcttaacctgcgaaaggtccggacgccagccgctggccagcgcctggtcggaaatatagcgctcaatattgccgatggtgactgccccgctttcatcgcgcagggtgcaggcgccttcacacagccggtcctggggacagacgcggccagtgatctccggcaggcagttggtctgatgggaaagcgcgaccgcagcggcgatattccccgctttaaccagctcaatccactgcgggatatggttatgcagcgggcaggtccattcgcaaatactgtgctccccacacgtgagacagcgggcggcctgctgctgcgcctgctgcggggtgaacggctgatagatctcctcaaagtggctcttacgcacctccgccgccagcttatccggctccccgcgcgggggcgtcatcgccatttgcctgaccttcgcgccagcattgggctggctgcagagcggcgtagcgcgctgccacggctgcacctcctggcatgccgagcgcagtcgccgctgcttcgccagggtgatcaacgtctcatcgtcggcgagggtcagcgcctgcgcgggacagttttccacacaggccggccccgcctcgcggccctggcatagatcgcacttgtgcgcgctggctttcaccaggcctgcggcctgcggcgtcaccaccacctgcatcaccccgaacgggcaggccaccatgcaggatttacagccaatgcatttctcctgacggacctgaacgctgtcgccggactgggcgatggcgtcgttgggacaactgcggacgcagggggcgtcctcgcagtggcggcaggtgatggcgttacgctggccctccgctttgatcacggtgatacgtggcaaaaagcgctgcggggtcagcacgtgttgctcctcgttatgcgccatcacgcaggccacttcgcaggcctggcagccgatgcactttcggctatcgctcaaaataaagtggttcatggcttccttttgtcttcttggtgaataacccctcaatgcgcatgcctatttattacccgacaagatgccgccggaacaatgtccaattgcccaggataaactttttctggagagaatccgttttggatcaatttttttgacttaaatgaaatgaggtttcacaccggcaagggataatgcgccggtctgcggtgacgaagcagactcgctacctgctggcaggaaagctcgaggtttctttacgatacggcaaaagcaacatgataaattacactatctccttaatttctccacgattgccggagaggctggcgctaaagtggcacaggctgtgcaataacaagaaaatgtgcatatgaggtttttattctgatggcgaatttctttatcgatcgccccatttttgcatgggtgctggcaatcctgttatgcctgacgggcgcccttgccattttgtcgctgccggttgaacagtatcccgacctcgccccgccgaatgtgcggatcaccgccaactatcccggcgcttccgcgcaaaccctggagaataccgtcactcaggttatcgaacagaatatgaccggcctcgataacctgatgtatatgtcctcccagagcagcgccaccggccaggcgacgatcaccctcagctttaccgccggtaccgacccggatgaagccgtgcagcaggttcagaaccagctacagtcggcgatgcgtaagctgccgcaggcggtgcaaaaccagggggtgacggtgcgcaagaccggtgataccaatatcctgacgctcgccttcgtctccactgacggcagtatggataaacaagatatcgccgactacgtcgccagtaacatccaggacccgctcagccgcgtcaacggcgtgggggatatcgacgcctacggttcgcaatactcaatgcgcatctggctcgacccggcgaagctcaacagctaccagatgaccaccaaggatgttaccgacgccatcagttcgcagaacgcccagattgccgtcggccagcttggcgggacgccttcggtcgataagcaagcgctgaacgccaccatcaactcgcaatctctgctgcaaaccccggagcagttccgcaatatcactctgcgcgtcaatcaggatggttcagaggtgacgctgggcgatgtcgccaccgtcgagatgggggcggagaagtacgactatcttagccgctacaaccgccagccggcctcaggcctcgggatcaagctggcttccggcgccaacgaaatggccaccgcggagcgcgtgatcaatcgcctcaatgagctggcgcagtttttcccccacggtctggaatataaggtcgcctacgagaccacctccttcgtgaaggcttccatcaccgacgtggtgaaaaccctgctggaggcgatcctgctggtcttcctcgtgatgtatctgttcctgcagaacttccgcgccaccctgatcccgaccatcgccgtgccggtggtgctgatgggcactttcgcggtgctgtatgcctgtggctacagcatcaacaccctgacgatgttcgcgatggtgttggcgatcggcctgctggtggatgacgccatcgtggtggtggagaacgtcgagcgcatcatgagcgaggagggcctgtcgccacgcgaggcgacccgcaaatcgatgggacaaattcagggcgcgctggtggggatcgcgatggtgctgtcggcggtattcgtgccgatggccttcttcggcggcaccaccggcgccatctatcgccagttctcaatcactatcgtcgcggcgatggtcctctcggtgctggtggccatgatcctcacccctgccctttgcgccacgctgcttaagccggttaagccaggtgaatcccatgaaagaaaaggcttcttcggctggttcaaccgcaccttcaaccgcagcgccagccgctacgaaaccttcgtcggcaaaatactgcaccgctcgctgcgctggatgctgatctacgtcgtcctgctcggcgggatggtgttcctgtttctgcatttgccgacctcgttcctgccgctggaggatcgcgggatgttcaccacctcggtccagttgccgagcggcagcacccagcagcagacgctgaaggtggtgcagaaggcggaagattacttcctcaataacgagaagcagaacgtcgagtcggtgttcgctaccgttggctccggccccggcggcaatgggcagaacgtggcccgtatgttcgttcgtctcaaagactgggaccagcgcgacccgcaaaccggcacctcctttgccattattgaacgcgccaccaaagcgtttaatcagattaacgaagcgcgggttatcgccagcagcccgccggcgatcagcggcctcggcagttcggcaggcttcgatatggagctggaggatcatgccgggaaggggcacgatgcgctgatggcggcgcgcgatacgctacttgagctggccgggaaaaatccgctgttgacccgcgtccggcataacgggctcgatgacagtccgcagctgcaggtcgatatcgatcagcgtaaagcgcaggcgcttggcgtctccattgacgacatcaacgatacgctgcaaaccgcgtgggggtcgagctacgtcaacgactttatggatcgcggccgggtaaagaaagtctacgtccaggcggcggcgaaataccggatgctgcctgacgatatcaatctttggtacgtgcgcaacagcagcggcacgatggtgccattctcggccttcgccacctcgcgctgggagaccggctcgccgcggctggaacgctacaatggctactcagcggtcgagatcgtcggtgaggcggcgccgggtatcagtaccggtaccgcgatggacatgatggagaagctggccgcgcagttacccaccggctttggcctcgaatggaccgccatgtcctaccaggaacgcctctctggcgctcaggcgccggccctgtacgcgatttctctgctggtggtgttcctgtgcctggcggcgctgtacgagagctggtcggtgccgttctcggtgatgctggtggtgccgctgggggtgattggcgccctgctggcgacctggatgcgcgggctggagaatgacgtgtacttccaggtgggtctgttgacggtgatcggcctgtcggcgaaaaacgccattctgatcgtcgagttcgccaatgagctcaacgagaagggccaggatctgctcagcgccacgctgtcggcttgccgtcagcgcctgcgccccatcctgatgacctcgctggcgttcatcttcggcgtgctgccgatggcgaccagcaccggcgccggttccggcagccagcatgcggtcggcaccggagtgatgggcgggatgatctccgccaccgtgctggcgatctttttcgtgccgctgttctttgtgctggtgcgtcgccgttttccgctaaaggagcgtccgcaataaaccgacgagcttcggcggcgaggcgtaataacagaaaaggcgaccacggtggtcgccttctttatgtgttcagaaccctagcgcgcttatttacttcgcgttattcccctgctcacattgcggaaatttatttacgaagcatgccttcaataaagtctttccagttccccagttcatgttcaatcataatagcctctcttattattatggtcgattctatataacttcattaccgatgggaagttgtgctcccctattgctctgattgtcttatggaccgctgacagagataaaacctctggttgtcgctactatgccgcttcgtatgtaaacataatgtgacgtagagcaacctcagacaacatttttgcaataatgttaaagccctcacatcatgcccacaggtggccaacatttaaccacccgatatatcgaatgagatccccggtaaaaagttatatttattcatctgaatcacgtattatttcagtaagacttatatattcggaaatatctgagttaaccgcttaattgaatgtaaaaggtttatctatgctcaccatgtacggaattaaaaactgcgataccattaaaaaagcccgccgctggctggaagcgcatcagattgagtatcgcttccatgattaccgcgccgatggccttgagcgtgcgcaactggatacctttattgccgagctgggctggcaggcgctgctgaacacccgtggcaccacctggcgcaaacttgacgagtcgctgcgcaatagcatcgataatgccgacgccgcagccgcattgatgctggaaatgccggcaattatcaaacgcccattgctctgcgcgcccggtcgtcctatgctgctgggttttagtgaagcaagttatcagcagtttaacgaggtatagtctatgtcttgcccggtcattgagctggctcagcagcttattcgccgcccttcccttagccccgatgatgcgggatgccaggcgttaatgattgaacgcctgcgtgcgatcggctttaccgttgaaccgatggatttcggcgatacgcagaatttctgggcctggcgcggccacggcgagacgctggccttcgccggccacaccgacgtagtcccggcaggcgacgccgaccgctggatcaatcccccgttcgaaccgaccatccgcgacgggatgctgtttggccgcggagcggcggatatgaaaggctcgctggcggcgatggtggttgccgcagagcgttttgtcgcgcagtacccgaaccacaggggccgactggcgtttttgatcacctctgatgaagaggccagcgccaaaaacggcaccgtcaaagtggtggagacgctgatggcgcgtaacgagcgtctggactattgtctggtcggcgaaccttccagtaccgaagtggtcggcgatgtggtgaaaaacggccgccgcggctcgctgacctgcaacctgactattcacggcgtgcaggggcatgtcgcctatccgcaccttgccgataaccctgtccaccgcgcggcgccgatgctggcggaactggtcaatatcgagtgggataaaggcaatgagttcttcccgccgaccagcatgcagatcgccaacgtgcagtccggcaccggcagcaataacgtgatccccggcgatatgttcgtccagttcaacttccgcttcagtacggagctgacggacgagatgatcaaatcccgggtgatcgccctgctggaaaaataccagctgcgttacagactggagtggtggctctccggccagccgtttctcaccggacggggcaagctggtggatgcggtcgtcaacgcgattgagcactataatgagatcaaaccgcagctgttaaccaacggcggcacctcagacggacggtttatcgcgcgcatgggggcgcaggtggttgagctgggccccgtaaacgcaacgattcacaaaattaatgaatgtgtgaacgccgccgacctgcagctgctggcgcggatgtatcaacgcgtcatggaacagctggtcgcctgacgaattgacgtaaagaggaagcgcgcatggaatggcttattaaacactggtggattctggtgctggtctttttggtgggggtaattatcaacgtgattaaagatctaaatcgcgttgaccacaaaaaattcctcaacaacaaacccgatctgccgccgcaccgtgattttaacgataaatgggacgacgacgacgactggccgaagcacgaccagtcgaagaaaccgtaagtttgcctttatcgcggtaccgcccgcctgtaaccccgctctccggggttacagcatttcgatgatatcgtccccttttggcgtactgccgctcagcgcctcatcaaaatagtgcttcggcacggtataacgcagacgctcgatcgccaactgcatgctgcgatcgtcaatggcatgcccgagatcgtcgacaatatctaaggtcacgtcgccgcccgcctgctgtaacgcctcctcggccgacaccgcccacgccaggtcgataacccgatcttcaccaccgtggatcaggtgaatggtagtggccgtcgttgccgtctccggcagcgtcgcatagcggccattaaaggcgatgacccgcgaagccagatccggcgccgctttgatactctccagcgacataatcgccccctgagagaaaccgatcagcgcggtggccagtggactgacgccgctcttttcctgccagtagcgtacaatttcaataaaggtcggcataatggcgtcgatgcgctgctgacgattctcttccgtcaccccctgcagcgaaaaccactgccgaccgttggggccgcaaggttccaccccgccaatgctgacgatcagcgcatcgggaaactgcggcgcgaaccagctgccgatttgccccatggagaccgggttatcccctacgccatgaaacagcagcaacagctgttgcgcaggcgccgcagggctttgaacaataaaatgatcgtgtttcatggctgtctccttagtgtttgcgggcagtgtacgccgctcgccagatatgaccatgccatttaactgaatgagttagttaaaaaaattgcagatgcgccacctgctgacgcagcgcctcagcgcgcgctgcatcaaggaagcgcaaggcgtcagcggcctcccgacgccatctcgcctgcaaggcttttcgccccgtcagctgcagcacggcgcagagtgcggcctcctctttgccctgcagtcgtccccgcagggccggcaacggcatgtcggcctgcatcagtaggcggttgaggcagcccagcgccgcggccagcgggcggtgggcgaaggcaaagctcgccgcttccagccagtcctcatcactaagcatagcgtctgcgacggccggcagcggcgcggattcctctcgccacgggcgaagccagtattcatcgcgctgcagccgctgcgcctcccgctgcgccagctggcgccctgccgcggtcaacggatagagggccatcgccgtatagcagccgctgctggcctcgcgatgggtacccagccgtacgagggtaaacccgcagcgttgccagaagcgccacagctcagcggtatagccgaagctgacggagagatagtcatagccagcggcatcggcggcgatatcggcgatcatcttccgccccaggccttcccgctggcgggtgggatggacagcgatccgactgacccgcagcccgcgcagcgtcgccgccaggggactgccgccgtgcgccgccagcgactgggcgaccagattcccgcgcggccggcgaaaacccgcccataccgcccggctcagttcgggagaaagtcccccctcggccaccagccacagggcgcccgccaccgcgccgccggtgcgagcgcagcggaaagcctggcccggagcatccatcatgcgccgcagatcgagcggggaagttcggtaatgcgccccggacaatagctggtacatcgcctccggtagcgctggctgcgtttgccagcaggactgattgaccgcctccagggctatctcccccatcggcgcgtcgcgaaatgcctcatcgttaaagataagcaactgactgatggctgactccagcggacagcccgccgcccagcggatcggggcgctcagggtgaaggattgcagatggggcagactggcgcaaaatttcagcaggaacccgcgaccggtgccctcgtacccttgcaccgtcgtggtgagtagcgtgcggggaaaacggctcaccagctgccggagaagcggagccgggatagccgcggcctcatcgactatcagccacgccgccttttctttcgacgccagcagcgcatcgggcgccataaagcgcaacgtctccccggcaaagctggccagcacctcgacagcgctacgcgttggggcggtgacgatggcctcgcccccaagctggcgcaggagcatgcccgccagcgcggacttcccccgtccacgctccgccgtcaccgccgcgataccgggcggcaggcgtatcagttgctcaaggattgccgcctgctcggtctgcgggcggccatcggcgggatgccagtctggacgcggggcggccagcgggaaacgtggccggtccgactgccgccagagcaacacctccggatcggcgataaactgccgacagcagcggtgaacaaagttaggggtaacgatagggtcaggcgtatcgctccagcgcagagagtcctcatccgcccgggtcggccagtcggcgaaggggggcgtcagcagcaccagccagcttcccgcccgcagcgtgccgctcagggccgccatggcggccacatcaaacccgcgccgggcatcgaaaaaggcgtgcatcacttcccgccccagcagcgttttcagcgcgccgggcgccacgcagggcgcagaacccggctcggggccaacccacaggccatcgccgccgagcctctcccgtagcacctgcgcctgctgcagcgtccagctctcatcgccgctgagcaccagcaggcgacggatcccctcccgcgccatttgcgcggtgaggttaagcagcgcgtccatcatgggggacgattacagcgcactgccgaaggtattgcactgcgccggatcgccgctatcgaaaccgcgtttgaaccaggtgtagcgctgtttcgaggtgccgtgggtaaaactgtccggcaccacgcgtccctggctctgctgctgtagacgatcgtcgccgatggcctcggcggcgttcagcgcctcctgcagatcgccagtttccagaatatcctgctgctgcatattatgaccccagacgccggcgaagcagtctgcctgcagctccatcttaaccgacaggcggttggcttcggcctgcgtggcatgctgctgttgctggcggaccttcggctcaatgcccagcagtttttgtacgtgatgacccacttcatgagcaatgacgtacccctgggcaaagtcgccgtcggcgcccagtttatttttcatctcatcgtagaatgacaggtcgatatagaccgtactgtcggcaggacaatagaaggggcccatcaccgactgaccggtgccgcagccggtacgggtcgcgccgcggtagagcaccagctttggctgcgggtactggcggcccatcttttcaaagatcggcccccaggtatcttcggtggtagccagaatgacggaagtaaacttcgccgcttcatcgtctttcggactgatggagcgctgcgtggaggtctgctgctgcggcatcggttcgccggtcaacatgccggtcaaatccacgccgtagtagcccgccaccagcacaataatcagcagtacaatgccgcccttcccgctcggcagacggaagccgccgcccccgccgccgccaaacggcgagcctgattgtccacgtcgatcttcaacattgtcgctttcgcgacgcccttgccagcgcataagcacctcattccctgttatgtatcaatagcagagatcgtaggcggttcagcgcaggattaccacaggaaacagcaagagacgccagaagatgaggccatcttctggcggcgggcgggttagtcgagcttaacgcccaggcggtgagccacttcttcgtaggcttcgatcaggccgccaaggctctggcggaagcggtctttgtccattttatcgagggtgtttttatcccacaggcggctgccgtccggcgaaaactcgtcgcccagcaccacttcgcctttgaacagaccaaactccagcttaaagtccaccagaatcagaccggcgtcatcgaacagttttttcagcacgtcgttggctttgtaggtcagctcgcgcatccgcgccagattctctttactcacccagccgaaggtttcgcagtaggagtcgttgaccatcggatcgtgcatagcatcgtttttcaggaacaggtcgaacagcggcggattcagctcgataccttcttcaatgcctaaacgttttaccagcgagcctgccgcacggttacgcaccacgcactctaccggcaccatatccagttttttcaccagacattcggtatcggagagcagcgcttccatctgggtagggatgcccgcttctgccagtttactcataatgaaatggttgaatttgttgttcaccatgcctttacgatcgaactgctcgatgcgcgcgccatcacctgctgacgtatcgttacggaattccagtaccagcaggtccggattatcggtgctgtatactgtcttcgccttaccacgatacaactcagcttgctttttcatctttcactactccagtgatattgagcctaaaaatacgtttccacctatacacaaaatcattcaaagtgcatcgaggcggcaactgagcgaatccccaggagcttacaaaagtaagtgactggggtgaacgaaggcggccaacaaagaggcaatttgaaggatgatgtgtatacgcacacgtttgcgtcactatatattaaaagggccggattgctccagcccttttgattacttgttaaatgcggcctggaatacggctaccagggcgtcattttgcgactgcgtcagggtgtggcctttcgggtcgataaactgcaggctactgcggttatcgaggtcgccgacctgcagtttgtagtcgccggagaccagctgcgggtcacgtgcgcccagctcctgccagctgctgtcagacagcggcttataggtcagcgccatgctgccctgagagcgcgtgctgtcggtcactttcatccccactttctcgagggcgccaggcagacgctgccacaccaggttaaacggcgcgcgaactacgagcatcggcaggccggtatcgtcggcggcgctctgcacgtcgaaggtggcccccgcgctgcgctgggcggcgttctgggcgctggtggcattcatgtcaaggccttccgaaatgacgttcagcatagcggtgctgtagcgctgcagagacgccggatcggcaaccggtttacccgcctgctccagattcaccagcttaacgaccaccgcttgctgataaccctgcggtttgacggagatttgataacgaccgcgatactgctgatcttcatcaagacggttccactcaacccagtcggtgttcagcgtctggctcgcatcatcgcgcttggcgataacgtagttcttcgcctgaagaatactggtgacctgtgcccacagcgaaccgctgcggccgttctcgaccatcagcgtcgcggtatcgccgttaaactgggtccgcgcaccgctcaccagcgccagcggctgcgccggcggacgaatgtccagcgctttaccgaccgcgccggtgctgttagccaccggaatattgtaatcacccacctgaatcggcaggatcatccccgccggcgcatgaagttcgctcaacggtgatgcctgtaaataggcctcatcaccgctcacctgacgcttatagcgcgagtcagaactacaggccgcgaggagtagaaccagcgaaacacccgcaaccttcgccaggcgcgacttctgtactgagtaagccatcaaatctccctaaactttacagcaaaccggcatgcttcagcgcggcagtgacggcttcacgaccatgatcggtgataggcgtcatcggcaagcgcagcgtatcggtcgccacaagacccaacgccttgcatccccatttcaccgggataggattgggttcgacaaataattttgtatgcagtggcatcagacgctggttaatcgcacgagcttcggcaaattgacccgccagcgccagacggcacatgtcggccatttcgcgcgccgccacgttggccgtaacagaaatcacgcctacgccgccgagctgcatgaagtccataccggtcgcatcgtcaccgctcagcagaataaagtcgtctgaaaccagctctttgatctggtgaacgcgacttaagttccctgttgcttccttaataccgacaatatttttaatttccgccagacggccaacggtttccggcagcatatcgcaaccggtacgggacggcacattatacagaatttgcggcaggtcagtatgttcggcgatagctttaaagtgctggaacaggccttcctgggtcggacggttataataaggagtgaccgtcaggcagccgacaacaccgctatcgttaaaacgtttggtcaggctaatcgcctctgcggttgcattggctcccgttccagcgataaccggaatacgcccgtcggccagctccagcgtcatcatcaccacgtcgccatgctcttcatggctcagcgttgcggattcaccggtagtccctaccgaaacgatcgccgaggttccgttggcgacatggtaatcaatcagttttttcaggcttgtccggcagacattaccgttttcatccatcggcgtgacaagcgctacaatacttcccgtgaacatgggccatcctcagagcagaagtgcgacaagattctcaatgttacgtttggagctgtaataaaagcaagagacccgacgccatcagggatgttgtatggcggttttttttatgctttcctaatgttacctcacctttttaaaggaagaacaggtttgacagcctcattacaacactatctggttattaccgccctgggggctgaccgtcccggcatcgtgaatacgatcactcgccacgtcagcagctgcggttgtaatatcgaagacagccggctggccatgctcggtgatgagtttacgtttatcatgctgctttccgggtcgtggaatgcgattaacctgatcgaatcaactctgccgctgaaaggcgcggagctggagctgttgatcgtgatgaaacgcaccactgcgcgcccgccgcaggccatgccaaacaccgtttgggtccaggttgaggtgccggactcaccgcatatcatcgagcgctttactgccctgtgcgatacatggaatatgaatattgcggagctggtgtcccgcacgcagccgggagacggcgattccgcgcagctttttattcagataactgcccacagtcctgcgacgcaaaatgcagcaaatatcgaacaagcgttcaaagccctatgtacagaactgaacgcacaaggcagtattaacatcgttaattattcacagcatgatgaacaggatggagtttaacccatgaccccactgaaagccggtgatatcgcaccgaaatttagcttaccggaccaggacggcgaggaagtaaatttaaccgacttccagggacaacgtgtcctggtttatttttacccgaaagccatgaccccgggctgcaccgtacaggcgtgcggcttgcgcgataatatggacgacctgaaaaaagccggcgttgaagtgctgggcatcagcaccgataaaccggaaaaactctcccgtttcgccgaaaaagagctgctgaactttacgctgctgtctgatgaaaaccatcaggtttgcgagcagtttggcgtctggggcgaaaaatcctttatggggaaaacctacgacgggatccaccggattagtttcctcatcgatgccgatggcaaaatcgaacacgtctttgatgatttcaaaaccagcaatcaccacgacgtggtgctgaactggctgaaagaaaacgcctgatgcaaagcaagacgccgggagaggaagccctcgcccggcgtctttttttattctcattgccttagtcgtcgaccgccaaaccatccggccaggcatgcaccacagctttaatcagcgtggccagcggaatggcgaagaagacgccccagaatccccacagtccgccaaagatcaccaccgacaggataatcaccagcgggtgtaaattgaccgcttccgagaacagcaccggaaccagcaggttaccgtccagcccctgaataatcagatagaccgcaaacaggctccagaactcggtgccagcgccaaactgaaacagcgccacccccaccaccggaatggtcaccacaaacgcgccgatataggggatcagcaccgagaagcccaccagcaccgccagcagcaacgagtagttgaggccaaagagaataaagcctatccaggtggcgacgctgacgacaatcatctccagcaccttgccgcgaatgtagttggtgatctgctggttcatctctttccacacctgcccggcaagcccgcgattgcgcggcagaacgcggcgcaccgcgttgagcatctgctctttatccttcagcaggaagaagaccatcagcggcaccagcaccagatagaccgccagggtgagtaaccccaccagcgaggccagagagtacttaaccaccgagtcgcccaccgtcagcatccgggtgcgcatattttccgccatcgcatcgataatgccggcatccattaacgccggatagcgccgcggcagcgtggcggcgaaatcagagagcttatttagcatgcccggcatatcgcggatgaggtagatcccttgctgccaggctaccggcagcaccacaaaggccagcaacagcaggatgcccacaaagaggatcagcaccagcgaggtggcccaggtgcgcgacagaccgatgcgctccagacgaacggtcggccactccagcagatacgccagcacgatagccaccagcaacggggccagcaggccgctgaaaaagaacataatgccgaaaccggcaagcaaaataaccagcagcgctatcgcctcagggtcgctgaatcgacggcggtaccactgcattaacatctcaagcataaaaccttccctgaagggccaagcggcgacaatccgaggaattgtatcgaaatgtcacaaaaaagacttcgctttttgatgcgccgcagtcaaaccgttctccgccatgaagaacatattttcaaggcggccaacgccagctaaactcgctgggatgcggccagggaacattacgccgcacaatcggtcaaactggcacacccacattacaggacagaggttatgttcaggcagttgaagaaaacgctggtggcgaccgcgatcgcgtcgctgacgctgggttcgataggtcctgcttttgctgactccgcagataccctgccggacatgggaacctccgcaggaagcacgctgtcaatcggtcaggaaatgcagatgggggattactacgtccgccaactgcgcggtagcgcgccgctgatcaacgaccctctgctggtgcaatatatcaacgggctgggtatgcgtctggtggctcacgccaactcggtgcgtaccccgttccacttctatttgattaataacgaccagatcaacgccttcgccttcttcggcggcaatgtggtcctccactccgccctgttccgctactctgataacgagagcgaactggcctctgtcatggcgcacgaaatctcccacgtgacgcagcggcatctcgcccgcgcgatggaagatcagaagcgcaatgcgccgctgacctgggtcggtgccctgggttcgattctgctggcgatggccagcccgcaggccggaatggcggccctgaccgggacgctggccggcacccagcagggtatgatcagcttcacccgccagaacgaagaagaggccgaccggattggcattcaggttctgcagcgctcgggtttcgacccgcaggctatgccgatgtttatgggtaaactgcttgacgagtcgcgctactcgacgcgaccgccggaaatgctgctcacccaccccctaccggaaagccgactggccgatgcccgtaaccgtgccaaccagatgcgcccggtggtggtacagtcctcggcggacttctatctggcgaaggcgcgtaccctcgggatgtacactaacggcgacaacaagctgggcaccgatctgctgaacgcctgggataaaggcaatatccgccaacagcatgccgcccagtatggtcgcgctctgctggcgatggaaagcaacaactttgaccaggcacgcaaaacgctgcagccgctgctcaacgccgacccgcaaaatgcctggtatctcgatctggccactgatatcgacctcggacagaagaaaaccagcgacgccatcaatcgtcttaaaaacgcccgcgagctgcgtactaatccggtgctgcagctgaacctggccaacgccctgctgcagggcgggcagcccggggaagcggcgaccattctgaaccggtatacctttacctataaagaggatggcaacggctgggacctgctggcccaggcggaaggcgcgctgggcaatcgcgatcaggagctggcggcgcgggctgaaagcatggcgctggtcggccagctggagcaggcgatttccctgctcagcagcgccagctcgcaggtgaaactcggtagcctgcagcaggcacgttacgatgcccgtatcgatcagctacgcgatctgcaggctcgcttccgtccctatcaaaaaatgtaaggagaccccatgaccgacgcggtaaaaatttaccataacccacgctgctccaagagccgcgaaacgctgagcctgctgcagagtcgcggcatcgatcctgaggtggtgctttatcttgagacgccaccggatgccgggacgctgcgccagctgctgcagctgctgggtatggagagcccccgcgagctcatgcgccagaaagaggatctgtataaatcgctcaatctggccgacccggctctcagcaacgcggcgctgatacaggcgatggtcgacaatccgaaactcatcgagcgccctatcgtcgtcagccgcggccaggcgcgtattggccgcccgccggaacaggttcttgagatcgtaagctaactcacccgcgccgcgcttgcgcggcgctttttttacgtgggcgattccagatctttcacgccaatatctcccgcccgccggacggtgctactgttcatccatcgctcaatccactggacggatgaacatgaaaaagccgacctccacgccccatgacgccgtgtttaagacctacctctcccatcccgataccgcccgtgatttcctgcaactgtatctgcccgagacgctgcttaaagtgtgcgatctgcgtacgctgcatctcgagtccgggcattttgtcgaagacgatctgcgtcccttttacgccgacattttgtattccctgaaaaccacggcgggcgacggttatatttatgcgcttatcgaacaccagagcacgcccgaccggcatatggcctttcgtctgatgcgctacgccatcgccgccatgcagcgccatctcgatgccggccacgatcgcctgccgctggtgatccctgttctcttctaccacggtctggtgagcccctatccgttctctctgcgctggctcgatgaattcgtcgctccggagctggccggccacctttatcacggggcgtttccgctggcggacataaccgtcattccggatgacgagattgccacccaccagcgcatggcaacgctggagttactgcaaaaacatattcgacaacgcgatctggcgcagctcctcgacaagctgagcgaattattattgactggactggcgacggaatcgcaggtacaagccctgatgcactatctggtacaggcaggcaacacgcgcgagccgattaaattcattcgcgagctggcgttacgtacgccgcagcataaggagacgttgatgacgattgcggaatatctggaacaacaggggctggagcggggcctggcgcaaggccgtcaggaaggacggaaagaagaggcgcagcgcatcgctgtcgctatgctgcacagcggccttccgcgcgacctggtcgcccggttgaccgggctgacggagcaggagctgactcccctggcggactaaagcttaaggatctctttcacgaaggggatcgtcagcttgcgctgagcggtaatcgaggcgtgatccagctgatcgagggtcataaacagcgagcgcatctcgcgatccagccgcttcagcaggaagcggcacacgtcttccggcatctcgaagccgcgcagtctggcgcgtagctgcagcgcctgcagtttgtcttcatccgacagcggctgcagcttatagatctgcccccagtccagccgtgaggccagatccggcaggccaagattcagctgccgcggcggccgatcgccggtgatcagcagccgggttttgcctgattccaggatccggttatagagattaaagatggccatctcccagggctcatcgccggcgacgcactcgatgttatcgatgcacaccagcgccagctgttccatcccctccagcacctcgggcacaaaccacgtccgtttatccagcggcacgtagcctaccgcatccccgcgctgggaaagctccgcgcaggcggcgtgtaacaggtggctacgacctgccccttcacgtgaccagatataaatgtacccgctgtgttcctggcgcagtacgttctggagggcggcaagtagggaaggattatcacccggccagaaactcgcgaaggtttcgtcgtcaggaagatacagtggcaaagagagctgtgccggtgcgttcagatggacctcaacataggcttacagaaaaacgcgaagagtttaccacagatttaggtcaggagagaaccgggcgggatcgccgcccggtcaggcgatcgttatttaaactcttcgctatccgccgcgtcgaggaccacctcttccggacgcaggacgctgataagcttgaaaatcaggctgagggcgatgcccacgatagtcgccagcgccatccctttcagctcggcggcgccaatgtgcactttagcgccgctaacgccgatgatcaggatcacggaggtgaggatcagattctgcgctttactgtaatccaccttcgattcaatcagtacgcggatccccgaggcgccgatcaccccgtacagcagcagggaaacgccgcccatcaccggcaccgggatgatctggatagccgccgccagtttgccgacgcaggagagcagaatcgcaatgatcgccgcgccgcggattacccaggtgctgtagacccgggtaatcgccatcacgccgatattttcaccgtaggtagtgttgggcgtcgaaccaaagaagccggaaacgatcgtcgacaggccgttggcaaacatcgaacgatgcaggcccgggtcgcggatcagatcgcgcttaacgatattggcggtcaccaccagatgccccacgtgctcggcaatcaccaccagcgcggcgggcagtatggtgaagatagcaaaccactcaaagcgcggagtgtagaaagtcggcagcgcgaaccaatgcgcctcggcgatcggggtggtatcgaccacgcccatcacaaacgacagcgcatagcccaccagcacgccgatcaggatcgggataatcgccaggaagccgcggaacagcacggatccgaacaccgtcaccgccagggtcaccatcgagataataatggttttactgtccggtgactggccgtcggccggcagcagcccggccatattagccgccacgcccgccagttcgaggccgataaccgccacgatggcacccatcgccgccggcgggaacatcacatccagccagccggtaccggcttttttgacaataaaggagacgaggcagaacagcacgccgcacataataaagccgcccagcgccacttcgtagcccagcggcaacagcagcagcaccggggagataaaagcgaagcttgatcccagataagcgggaattttgcctttacagataaagaggtacaacagcgtaccgatgccgttgaacagcaggacggtggccgggttaatgtggaacagaataggcaccagtaccgttgcgccaaacatggcgaacagatgttgcaaactaagcgggattgtctgtaaaagcggcggtctttcactcaccccgatggcacggcgcgtcatagtgtattcctctgagagtcgtctgttatttgctgtggattacttttattcaaaaaaaagccgactctcaaagtcggcttttttcgcggtatattttatttcgttccaaaaatcttgtcgccggcatcgccgagaccgggaatgatatacccgtgctcgttcagtcccttatcgacagaggcggtgtacagctcaacgtccgggtgggctttctccagcgcggcaataccttccggcgccgccaccagcaccagcaccttgatgctggtgcagccggcgtttttcagcagatcgatagtggcgatcatcgacccaccggtggccagcatcgggtcaacgaccagcgccatacgttcatcgatattagacaccagtttctggaagtaaggcaccggctcgagggtttcttcattgcgatagataccgaccacgctgatacgcgcgcttggcacgtgctccagcaccccttccatcatgccgaggccagcgcgcaggataggcacaacggtaattttcttgcccttgatctgctcgacttccaccggaccgttccagccttcaatagtgactttctcagtctccagatcggcggtggcttcataagtcagtaagctgcccacttctgaggcgagttcacggaagcgtttggtgctgatgtcgtgctcgcgcatcaggcccagcttgtgtttgacgagtgggtgtttgacttccacaatcttcattctctttctcctctgaggggcagccacaaaaaaaatcgcgggattataccgctttttgcggattgtgccatacccatcttgcttgacgtatatcaagcaaagtgatttagagacaaaaaaaccggaggcgaggctccggcttgggtgcggggtgcagtccatacgcttacgcgggcctacgtgtattgtaggtcggttaagcgttagcgccacccgactacgacagcttctccccgttgctggcaattacctgctgataccaggcaaaggactttttccggctgcgtgccaacgtgccattgccttcattatctttatcgacataaataaagccgtagcgttttttcatttcccccgtgccggcggaaaccagatcgatacagccccagggggtgtagcccatcagatcgacgccatcctcgaccaccgcctttttcatctccgcgatatgggcggagagataatcgatacgatactggtcattgacgctgccgtccgcttcgcggacatcaatcgcgccaaagccgttttcgacaataaacagcggcagctggtagtgatcccagaaccagttcagcgaatagcgcaggccgaccgggtcaatctgccagccccagtccgactttttgacgtacgggttggagaccaggctggtggtttcatcataatcaagcaaggggttgtcttcggtggctttggtagcgaacgacatatagtagctaaagccaatgtagtcgacacagccctcggttaacgcctgacgatcggcttcggtgatatccagagtaaagccgcggcgggcaaaatagttgagcagatgctgcggatagcgaccgcgcacgtggacgtcggtaaaccagtaacggcggtgcatggcgttcatcgccatcatcatatcgtccggggcgcaggtcagcggatagatggggcacatagcgatcatgcagccaatctgcagcgccgggttgatctcgcgcgccgctttcaccgccagggcgctggccaccagctcatagtgcgcggcctggtacatcaccggttcccggtcttcatccggcaaatatttcaaaccggagttggtgaagggggcaaagtcctcatggaagttggcctggttgttgatctcgttaaaggtcatccagtacttcactttatgttgatagcgggtgaagacgaccctggcaaagcgcacgaaaaagtcgattagcttgcggttgcgccagccgccgtactcggtgaccagatgataaggcatttcaaaatgcgacagcgtaatgactggctcaatgccgtgtttcaggcattcgtcgaacagatcatcataaaactgcaggccagcctcgttgggctccagctcatcgccctgcgggaaaatacgcgtccaggcaatcgaggtgcgaaaacatttgaagcccatctcggcaaacagcgccaggtcttgtggataacgatgataaaaatcgatcgcctcatggttcgggtagtttttcccggccaccacgccgtcggtaatttcccgcggcacgccgtgggcgccggcggtcatcacatccgccacgctgatccccttgccgccctcctgccagccgccctctaactgatgcgctgcgaccgcgccgccccacagaaaacctgctttaaatccggacatagtctctccctaatgtcgatcgtcgtctggcgaacgatacagctgattaaaatggtaaaccgcaccaatcaggccggcatcgttaccgtgactgacggtatcgagatagtcggcaatgccgaaccaggccagatgctggcgcagtagcgtcagaaatcctgggcgttccacaacgccgccaccgataaaaatggtctgcggatcgaagatatggacgaggttataaaggccatggcccaggccattgaagaactcggcgaccagacgctgacaaaccgggtcgccggcgtcatagcggtcgaaaatcagttcgcctgtcacgctatccagcggcgcgccaatatattgcgcatagcgatggcgcagcacccgcagagtgcagttctcattcattgaatagcgacgaggatcgcgtccgccgggacggtcggtaagcatatagccgaattcgccggcacgaaaacgcgccccgttgatcagctggtgttggcagaaaatcgccccaccgatgccagtaccgatagtgagcaccagaaaattggccatctccgccgctttgccctgccagcgctcggccagcagcacacagttggcgtcgttttccaccgagaccggcagcccggttcgcgtctcgagccacgatttcatggcgaagttatcaaatcgacggatagcgccgcccatggtgataagaccgctgtgcggatcgatatagcccggcgcgctgatggctattccttcacacgacggatgggccgccagccacgacagcattgcctgtaagatccgatcgccatcgctgtcattgattgactgcctggcggtttccagcagcctgccgtcgcgggtcatcacgcccatctttaacgcggtgccaccgatatcaaatgccgcaatcttcattcatccctctcctgacccgcgtcaatcaccgacaaaatgcgtggcaaaccaacaaggaaaccggtttcagtcgtataatgaggattcctttacgtagaggcaagcaccagactgtacccggtttcattttcgtgagcagtatcaaatttaaccattcatcagcggttttacgccaactgtaaagcaggctcgcaaacgtttgctttccctgttagaattgcgccgatttttcttgcttaccgcaaacgcgtggagacttcgcagtgaccgataaaacctctctcagctataaagatgccggcgtggatattgatgcaggcaacgctctcgtcgaccgtattaagggcgtggtgaagaaaacccgtcgcccggaagtgatggggggactgggcggattcggcgcgctgtgcgcactgccgcagaaataccgcgagccggtactggtctccggcaccgacggcgtcggtaccaagctgcgtctggcaatggatctgaagcgtcacgacaccatcggtatcgacctggtcgccatgtgcgtgaacgacctggtggttcagggcgctgagccgctgtttttcctggattattacgccaccggtaaactggacgtcgataccgcagccagcgtcatcaacggcatcgccgaaggctgcctgcagtccggttgcgcgctggtcgggggtgaaaccgcagagatgcccgggatgtaccacggcgaagattacgacgtggcgggtttctgcgtcggggtagtggaaaaatcagaaatcatcgacggcagcaaagtgaccgatggcgacgtgctggtggcgctggcgtccagcggcccgcactctaacggctattcgctggtgcgtaagatcattgaggttagcggcgttgacccacaaactaccgaccttgacggtaaaccgctggccgaccatctgctggcgccaacccgcatctatgtgaaatcggtgcttgatctgatcgccagcgttgacgtccacgctattgcccacctgaccggcggcggcttctgggaaaacattccgcgcgtgctgccggataacacccaggcgatcatcgatgagtcctcctggcagtggccatccgtcttcaactggctgcaaaccgccggtaacgtcagccagcatgaaatgtaccgtacctttaactgcggcgtagggatgattatcgccctgccggcagcggaagcggacaaagcgattgccctgctgaatgacaaaggtgaaaacgcgtggaaaatcgggtatatcaaagcctccgattccgaacagcgtgtggtcattgcatgaaaaacatcgtggtgctgatttccggtagcggcagcaatttgcaggcgatcatcgacgcctgcggccggaaacagataaacggcaccctgcgtgcggtattcagtaacaaggctgatgcgttcggccttgagcgcgcgcgcctggccggcatcccggcccatgcgctggcgcaaagtcagtttgccgaccgggaagcgttcgatcgtcagctgatgcatgaaatcgacgcctacgccccggatctggtggtgctggcaggctatatgcgtatccttagcccggcgttcgtcagccactatcagggacgtctgctgaacatccatccctcgctactgccgaagtatcctggcctgcatactcatcgtcaggtgctggagaacggtgacgaggagcacggtacctcggtgcacttcgtcaccgatgagctggacggtgggccggttatcctgcaggccaaggtgccggtcttcgctggcgacagcgaggaggaaatcacggcgcgggttcaggcccaggaacatgccatttatccgctggtcatcagctggttcgtcgatggacgtctgcgcatggcaggcaaccacgcctggctggatgagcgacagcttcccccgcagggctatgccgccgacgaatgaacaaccagccccgcatgagcacatcgcggggcttttttttaattaaaagtgtttactaatcaaacatctcacagaaataattcttcttactgtcatattgttgtgacacagtaaatcgctatgcagaaaaattcgtcataatagtctacgtcctgtgagtaaaacggagtgtgagcggtaatgggccaggaaaagctatacatcgaaaaagaactcagctggttgtcttttaacgaacgcgtgctgcaggaagcggcggacaagagtaacccgctgattgagcgcatgcgcttcttaggtatttactccaacaacctggatgagttttacaaagtgcgcttcgctgagctgaagcgccggattattatcagtgaagaacaaggcagtaccgcccattctcgccacctgttaggcaaaattcaggcccgcgttctgaaggccgatcaggaattcgatagtctgtataatgaactgttgctggagatggcgcgtaaccagatcttcctgatcaacgagcgccagctgtccgtcaatcagcaggcctggctgcgcaactacttcaagcagtatttacgccagcatatctcgccgatcctgatcaaccgcgaaacggacctcgtgcagttcctgaaagatgattacacctatctggcggtggagattatccgcggggaaaacatcaactatgctctgctggaaataccgtcggataaggtgccgcgcttcgtgaacctgccaccggaagcgccgcgtcgccgcaagccaatgatcctcctggataacatcctgcgctattgcctggacgatatttttaaaggcttctttgattacgatgcgctgaacgcctactcgatgaagatgacccgtgacgccgagtacgatctggtgcatgagatggagtcgagcctgatggagctgatgtcctccagcctcaagcagcgcctgaccgccgagccggttcgcttcgtctaccagcgcgatatgccggatgcgatggtcgaaatgctgcgcgataagctctccatttccaactacgactcaatgctgccgggcggccgctatcacaactttaaagactttatcggcttcccgaacgtcggtaaggccaatctggtcaataaacccatgccgcgcctgcgtcatctgtggtttgataaattccgcaacggcttcgacgccattcgcgaacgcgacgtgctgctctactatccctatcacacctttgagcacgtgctggagctgctgcgtcaggcctccttcgaccccagcgtattggcgatcaaaatcaacatttaccgcgtggccaaggattcgcgcattattgacgcgatgatccacgccgcccacaacggtaagaaagtcaccgtagtggtggagctgcaggcgcgcttcgatgaagaggctaacattcactgggcgaaacgcctgacggaagcgggagtccacgttatcttctctgcgccaggtctgaagatccacgccaagctgttccttatctcgcgtaaagaaggcgatgaggtggtgcgctacgcccacatcggcaccggtaactttaacgagaagacggcgcggatctacaccgactattcgctgttaaccgccgatgcgcgcattaccaatgaagtccgccgggtgtttaactttatcgagaacccctatcgtccggttagcttcgactacctgttggtgtcgccgcagaactcgcgtcgtctgctgtatgagatgatcgatcgcgagatcgccaatgcgcaaaacgggcaaccgtccgggattacgctgaagctgaacaacctggtggataaaggtctggtggaccgactgtatgccgcctccagctccggcgtgccggttaatctgctgatccgcggcatgtgctccctgatcccgggtctggaaggtatcagcgaaaatatccgcgtcatcagtattgtggaccgtttcctcgagcacgaccgggtctactgttttgaaaacggtggcgataaacaggtctggctctcctctgccgactggatgacgcgtaacatcgattatcgcatcgaagttgccgctccgctgctcgatccgcgtctgaagcagcgggtgctggatatttttgatatcctgttcaacgatacggtaaaagcgcgctatcttgataaagaactgagtaaccgctatgtgccgcgcggcaatcgccgtaaagtgcgcgcgcaaatggcgatttacgattatctcaaatcactcgaacaacccgactaacctatgccaataaacgataacacccctcgaccgcaggagttcgctgcggttgaccttggttcgaacagttttcatatggtgatcgcccgtgtcgtcgacggcgccatgcagatcatcggacgcctgaaacagcgcgtacatctggccgatggcctcgatgaaaactcggtgttgagcgaagaagccatgacccgtgggctgaactgcctgtcgctgtttgccgaacgcctgcaggggttctccccctccagcgtctgtatcgtcgggacgcatacgctgcgtcaggcgaccaacgcggcggagtttcttaaacgcgcggaaaaagtgatcccctacccgatcgagatcatctccggtaatgaagaagcgcgcctgatttttatgggcgttgagcacacgcagccggagcgcggccgcaagctggtgattgatatcggcggcggttcaaccgagctggtcattggcgaagattttgagccccgcctggtggaaagccgccgcatgggctgcgtgagcttctcgcaggcctatttccctggcggcgttatcaataaagaaaacttccagcgcgcgcgcctggcggcggtgcagaagctggagacgctggcctggcagttccgtattcagggatggaccgtggcgctgggcgcctccggcaccattaaagccgcccaggaagtgctggtggcgatgggcgagaaggacggatttattacgccggagcgcctcgagatgctggtaaatgagctgttgaagcataaaaacttcgacgcgctcagtctgcccggtctctcagaagaccgtaaagcggtctttgcgcctgggctggcgatcctctgcggtgtgtttgacgcgctggccatcaaagaacttcgtctgtccgatggcgcgctgcgcgaaggtgtcctgtacgagatggaaggccgcttccgccaccaggatattcgtagccgcacggcacagagtctggcaaatcagtacaacatcgatcgcgaacaggcgcgccgggtactggaaactaccacccagatgctggagcagtggcaggagcagaatcccaagctggccaatccgcacctcgcggcgctgttgaaatgggcggtgatgctccatgaggtagggctgaatatcaaccacagcggcatgcatcgtcactcggcctacattctccaaaatagcgacctgccgggcttcaatcaggagcagcagatgctgatggccaccctcgtacgctatcatcgcaaagcgatcaagctcgacgatctgccgcgctttacgctattcaggaaaaagcagtttctgccgctaattcagctactgcgcctgggcgtactgctgaataaccagcgtcaggctaccactacgccgccgacgctgcgcctgcagacggaagctcaccactggacgctgacgtttccgcacaactggtttagccagaatgcgctggtgctgctggatctggaaaaagagcaacagtactgggaaggcgtgccggaatggatgctgaagattgctgaagaagagccagacgcctgatcgtatctttggctatcaaccgagccgggcgcttacgcccggctttttgctgttcagccggtcatctcctccgccaactgcgtcagaggtaccggtaccccgatatcatagccctgcatataatcgatccccagcgtgatgaccgcctgacgtatttccggcgactccacatattcggccaccacctgcatgttcttcatacgcgccagacgacaaatagagtccacgacctggtaatcaagactgctggcaagcagattgcgaataaaactgccgtcgattttaagaatgtcgacgttcattgtttttaaccgggcgtagctggcgtagccggtaccaaaatcatcgatcgccacccggcagcccagcgcccgcagatgctctaaagtctggcagaccagctcgggattgctgagcgcgtagttctcggtcagctcgaaaataatctgccatggctcaatgttgtaggcctgcagcagcgcttcgacctcctgaggaaactggctgcggctcagcgacaccggagaaagattgatcgccagccgcagaccgggcagcgcccgccggttggcgtccataaaggccagcgtatgctcaataacccactggtccacccgcgtggacagcccaaactcgtgcgccaccggcaagaactcgtttggccccgttagctcacccgactcccctttcatcctcaccagcacttcatgatagcgatcgccgcgaatgccctggataggctgcgccatcaggacaaaatggtcatgttccagcgctttgagaatgcggttcatcatcacgactttatctttcagatcctgctgaacatggcccgcgccgcggcgctgtaaattttccggatggccgctggctaacgacatgtcggcaatggtgttcaactcgccaagcagtaaatacagatgcttgaccggcgagcgaacgttgcaatagctcatgccgatccgcggctgcagggggaccccgtcccagtggaaacggaactgtcgcagggagcggtcaattaagtgaatgcgcgcctggtgcccttcgctattgagacggaacactaaatcgtgaccggcaagatgatataccgcttcgttgggctgcagcagcgttctcaggtggttcgccagcatttgcttatactggattcgcaaaagtaccccatagtggcgccccagcagttcaagctcaggaatgcgcagaaaacagagcgtcgaccagctcgtgccgttgagcgcccggctcagcgcccgcaagttcggcatatgaaccaccgggtcgaggaaggccatctgccggacgcgagcgtagatcagccgctgctgtgtcgccagcatcgccgtataggcgacaataaacgagaataccagatagcttgatgaggtgatcgccaactgggtgttatagcttgggtaaattggtaagtaacggtaatgaaaatggatcacggcaatcagcaccggcgtccagatcagtgagataaagcgatagccaaaacgcatggcaccccagagcatcaccggcatcagcaatgacaacgtataattcgtactaaatatggtgctgctatcattaagcggcatcaataatagccacagtagcagaattaataccgtcgcccagcaaataatttcaattttttttatttttggatcaatttgtaagcgaacctgagaaataaagccgcgtaaatgaaaaggattacgaatgacccgtaacacaaaataacacagcggcatgccggtcaggcaccctaccattagcgcctgaaaggtgattaatgaacgtaaactaaatggcgtaacgccggtcatttccgttgtgcgcggatggagtccaagatattcggcaatctgtgacaaaatcagaaaaatgaccgaggggagcagcatttgccagaacagacgatgcggcatcagtcggacgttgccgtgtgagacctgctgacgctgggggacaaaaatgcggtagccgccccagcagagcacgcaggggataaggaaatggaacagtacaccgatggactgctcaaacatcatgccgtgggccagagttaacagcaggccaataataatgccagggatcgccgcccaaccaaaaaacatcatcaggctgagcaccagcgccaggggaagataatacaaaaataccatatgaccattgagcatggtgtaggtattcgcccatctggcgaccggtaataacagcgcaggcagaacgagcggtaaagcccaccacttgtcgcgatattgttgatagtattttaataaattcataggtgctctacagagtgcctctgctcccgcgaggcatattcaggcaggcatccaaccacccatgctgaccgcgtaaataataacgacacggtaacgtccgctgattttagtggccaagagaaggagactattgatataaatcaacaaatgctgacgccaacattaataaatcttatttttcccgacatttcacggctaataaagtgagcatgtaaatacgacgattatcttatataacattaattaatgttttcactgccgcacttttacatctgcatcaattgaccccatctcgttcctgtgccttaatacccccatcgcccatcttcgggtatacttcaaggatccttttgtgagtcaggcacccagtatgcgtaaacgacatcgatttaaccgtcgcatgacccgtatcgtactgcttatcagctttctcttcttctttggacgctttgtctactcctccatcggcgcctggtaccatcatcaggataaaaaagcgtcgcaggagtcatcgctcaccgtcgagccctccccccgcgagtaatcctttgattctaatactgcaagcgccacactccgcaggcagagccgctcgctgctgaagtactgtctttgatgcggtaattttgccgtcggcgatttataagcgcacggtatgcagcaggcgcagcatttcagcgataccttttgtcacaattttgtcctgacgcatgactaccgccagctgtcggtatagccgcggcgccagcgagtgtacgcgtaatccgtcgcgatcctccacccgctccaccgccatgcggggcacgatgctgtagcccagccctgcccgcaccatgcgcttaatcgcctcgatgctccccaactgcattaccggcgtcaccgccagtcccgccgagcggaaccagcggtcaatcagatcccgcgtgccgctacccgcctcgaaggcaatgagcggctgcgcctgcagctcggcgggagtataaaccgccggcatctccgtctcgcggctggcatagatggtcacgaactcctcatctaacatcgcagtcaccgccagactgcgcccctgcacgggcagcgtgaccagcccgagatcgagccggttttcttccaccgcgcggacgatatccagcgtgttgccggtggtcacccccaccgtcagcagcgggtgctgctgacgaagatgctgcagcagcggtggaagaagatgaatgcaggccgtcgcgcctgtccccagcgtcaacgatccattaacctcctgactgaatgcgctgaccgactgcaccgcgctattcaccgcccgatcgatctgctcgctgtgggccagcaatgtcattcctgccgccgtcgccttgatcccacgtccggttcgctccagcagcctggtctgtaaaaactgctccagctgacgtacctgcaggctgacggcaggttgggagatccccagcgcgtcggcggcggcagaaaagctgccgcgctgtacgaccagccggaaggtcgccagatttcccaggttcagtgttgtcataaaagtttctcttataccgcgcataaggtggccgctctgccagaacaatagcctgccgggtatgctcaggacaactgtcttaacggaatgaaaaaccatggaaataaacgctattccccgacgccttgccttcaccgcgggcggtcagcaactcatcaactgggggatctctttttatatgcccggcacctttgccggggctattgccgccgacaaaggatggtccttgccgcagatctatctcggcctgacgcttgcgatgctgatgatggccgctgtctccccgttcgttgccaggctgctggctcgctttggcggaagactggtggtcaccagcggtaccttactgatagccgccagctgcgccatgatggcctggcgcccttcgctggccggctggtacggcgcctggctgctgaccggcatcggcatgcggctctcactgtatgatgcgctgttcgccgcagtggtgaatctgtacggtcagcaggcgcggaaaactatctctcatatcactctcgctggcggtctggcctctgccctcttctggccgctgggcgaggcgttattaaccatcatgccctggcagaatgccctgcggatctatgcgctgtttggcctgctgagcgcatggctgagttatcaactgcctcgccagcggctcaattcagcggcgaaatcaccagcctcgccagcgacagcagagggcgaccggcgtaacggggcgcgttacgcgatctttattgcgctgatcaccttcatctctaacggtacctctacccatctgccggagtttatcagccactttggtctgccggttgccgtcggtgtgctgtggggattcggccagaccggcgcccggctgggggaagtgctggccggtccccgggtcacctcactcacgctaacgcgttttactgcgctcgccatgccgctctgttttctccttggattgagcagcacgacctttgccggatgcgcagccgggtttgtgctgggctatggcgcgattaacgggctggtgacgattgtcaaagcgacgctgccgctggcgctgtttagcgcagaaagctacgccagccgcacgggtctcctgctgatccccgggcaactgatggcagctgtttcaccctttgcctacgcatggctgaaccaccggctgggcattatcggcggaatgtgggtgtccaccgggttaacgttgatcgttaccggactggcgctggcgattgtgcgcgaggcgggtaaggcgcaggatgaacgtaatgtagaatatccggcagcggccgttgaccaaccgatagccaaaaacaaccttgctgaagagtaaacgtggatcactacgcccttgataatttacgcctgcgcttatagccatatggcaggcattattcatactataaatttttaatgaaaatacattcaccaaatcaataatgaaatttttaagagaatagcagggcatgctgtcacctgcgaaaaataacgataccgcctgtatttttcgcttgcataatgatccaaaaaataaagccagtcgccatcggtaacattagccacacctccggtaacacaattagctttactctcttcctcatcgaaaacgttcgagcatagcaaagaatgagcgctaattttaataccgtagcaaaacccggcggcaatcgatgcaatctggcctgtcggtattgcttttatctggaaaacgaggttccgcgtccagggtatgccaccatggacgacctcacgctggaagcgtacattcacaacaccatttcatcgaccccctcgcaaaacgtcgagttttgctggcagggcggtgagcctaccttatgcgggctggatttttttgcaaaggtggtcgagctccagcagcgttaccgtggtaacaaaatcatcgccaacagcctgcaaaccaacggcatcttgctgaacgataaatgggctcgttttttgcgtcgtcatggatttctggtcggattatccattgatggccctgcgtcactccacgacacctggcgtacgacgggctgcggaaaacccacctgggaaaaagttgtgcaggccatacgctgcctgcagcagcatgacgttccggtaaatgccatggtggtggtcagccgccagtctgcaagccaggggaaaagtctctatcgctgcctgagccgcgagctaaaccttcaccatctccagtttattcctctcgttgactcccctgctccctggtcagttacccctgagggctggggcaaatttttgtgcagtgttttcgacgactggctggaaaacgatgttggcagggtgtttatccagtactttgataatctgctcggcgtatgggccggccagcccgccacgctctgcaccatgcagcctgtctgtgggcagagtttactggtggagcaaaacggcgatgtctacagctgcgatcactttgtctcagcggaatataaactgggtaatctgaagcaagatgctatggcagcgatggcgagctcgccatttcagcaacagttcgggaagcaaaagggccaactctctgcccgctgtcagagctgccactggcgctttgcctgccatgggggatgccctaaacaccgttttaccatccatgacgacgaagcacagaattacctgtgcagcggctatttaacttttttcggccatatcacgccctatatgaacgtcatgcgaaggcttttattaaattgccagccgcccgcgctcattatgagtcttatcccggagattcggcaaaatatattacaattaacggagtctgaagatgaaagaaccaaataaaatagatggaaatcgccgcgatctcctcaaaggtctggggattgccgctgtcgtgagcctgttaccagagacgggaaacgccgcacaaaataatgccgccccgaaagcggcatgggatattcctttcaccggcgaaatccctgacacactgcccgaaggctacaatattttactcataacctgcgatcaggaacgttatttcgagcggtatccctttccggtgccgggccgggaacgcctgatgaaaacgggtatcacttttaccaatcatcagaacacggccaacgtttgtacgccatcgcgctctgtcatgtacaccgggctccatatgccgcacacccggatgtttgataatcttggcttcccctggatgaattacgatctggacccggaattacgtaccgtgggccatatgatgcgtgaactgggttattacacggcgtataaaggtaaatggcatcttacccgggagatcgatcagccggtcgctggtaaatcggtagaagaaatggacctgggcgagatcccgacgccgcgactgcatgaaattatggaaaagtatggtttctctgattatcacggcattggcgatgtcatcgggaaaagtaagggaggctatttctttgattcagtcaccacggggcagaccattagttggctacgtaacaccggccgcccgctgaatgatgaaaataagccctggttcgcggcagtaaacctggttaacccccacgatgtcatgtttatcgacaccgatgagcatggtgagcaggtgcagtggaaagggccaatggataaagaaaaccacaccctgctgccaacccaacccccgcacaaccaaatctatcagcaaagctggccagactatccgctgcctgcaaaccgccatcagtcgctcgatgagcctggcagacctgccgcccataaagagtaccagaatgccagggcggtgatggagggacagttccccgatgaagaccggcgctggcgcaaattactggattattatttcaactgtattcgcgacaatgaccagcatcttgaggcgattctcaatgagctggataacctgcagctgacgcaaaatacgattatcgtctttaccgccgaccatggggaactcggtggctcccaccagatgcatggtaaaggttcctcggtgtacaaagagcagatccatgtgccgatgatcattcgccatccggcgtatccgggaaatatccgctgcaacagtttgaccaatcatctggatttagtaccgaccctgattggtctgactggacgcgatcgctcgctgcgagagaaagtcctggagggcagaaaaggccgggatatgagcccattactggcgcatcctgagcaagcgggcttaaatgcgctgcgtccgggttcgctttattgttacggcatgatcctgtatatggatgcgcaatacacggcaaaattcagaaagctggctggagaaaaactcccgcacgatcaatttaaaaaagcgatcgcgtcactccatcctgatttttcccatcgctcagggatccgtatgatcaacgatggacactataaatttgcccgctacttttcgctcaagcagcatcatattcctgctaccctggccgagctgctggagaataatgatgttgaacttttcgatctggttaacgaccccgaagaaaatcataacctcgcccgggagccagagaaataccgggatctgttaatgacaatgaacgataaactcaatcagctcactgccgctgagattggcgaagatgatggcagctatatgcccccgtttgaaggaagccagtgggatctgacggcggcccagatgcatcaatatatgcgcgattagcgcttgccgtcaggtgggagaccttaatgtagcagctataaaaaaaccctctgtaaacacagagggtttcgttttactcagctaacgccggggattactcccactcaatcgttgctggcggcttgccgctgatgtcatacaccacgcgggagataccgttcacttcattgatgatacggttggagacgcggccgaggaaatcgtacggcaggtgtgcccagtgcgcggtcatgaagtcgatggtttccaccgcacgcagggaaaccacccagtcgtatttacggccatcgcccatcacgccgacggaacgaaccggcaggaacacagtgaacgcctggctgactttgttatacaggtcagctttgtgcagctcttcgatgaagatagcgtccgcacgacgcagcaggtcgcagtactctttcttcacttcgcccagcacgcgcacgccaaggccggggcccgggaacgggtgacggtagagcatgtcgtacggcaggcccagttccaggccgatcttacgcacttcgtctttaaacagctcacgcagcggctcaaccaggcccatcttcatctctttcggcaggccgcccacgttgtggtgagatttgatgacgtgcgctttaccggtggcggaagcggcagactcgataacgtcagggtagatggtaccctgcgccagccatttgacgtcgtccagcttcagcgcttcttcgtcgaacacttccacgaaaacgcgaccgataattttacgcttcgcttccggatcgctttcacccgccagcgcgtcgaggaaacgctgctcgccttcaacgtgaacaatgttcagaccaaagtggtcgccgaacatctccatcacctgctgcgcttcgttcaggcgcagcagaccgttgtccacgaatacacaggtcaggtttttgccgatagcgcggtgcagcagcatcgcggtcaccgaagagtccacaccgccggagagaccgaggatcactttgtcgtcgccaacctgctgacggatacgctcaacggcgtcgtcaatgattttcgccggggtccacagcgcttcgcactggcagatgtcgcgcacgaagcgctccagcatacgcattccctgacgggtgtgggtcacttccgggtggaactgcacgccgtagaagcgtttttcttcgttggccataatggcgaacgggcagttgtcggtgctggcgacggtcacgaagtccgccgggatggcggtcactttgtcgccgtggctcatccacacgtccagcagcggtttgccgtctgcggtcagggaatcttcgataccgcgcaccagcgcgctgtcgttaaccacttcaacctgcgcgtaaccaaactcacgctcgttagaaccttctacatggccgcccagctgcatcgccatggtctgcatgccgtagcagacgccaaataccggcacgccggcttcgaacacatactgcggcgcgcgcgggctgttctcttcggtggtgctttccgggccgccggaaagaatgatgccgcttggattaaattcgcggatctgtgcttccgtgacatcccatgcccacagctcacagtagacgcccagctcacgcacgcgacgcgccaccagctgagtatactgagacccgaagtcgaggatgaggatgcgatgtttatgaatgttttccgtcattgacgctaattccgaggcaagtgaaacagagtaaataaatcgcccgacgcaaggtcgggcgaagaaatcaggagcccagacggtagttcggggactctttggtgatggtcacgtcgtgaacgtggctttcctgaatgcccgcaccgctgatgcgtacgaattcagctttggtacgcagcaggtcaatggtaccacagccggtcagacccatacaggaacgcagaccgcccatctgctggtgaatgatctctttcaggcggcctttataggccacgcgaccttcgataccttccggcaccagtttgtcagcggcgttatcgctctggaagtagcggtcagaggagcctttagacatcgcgccaagagagcccatgccgcggtaagatttgtaagaacggccctgatagagttcgatttcacccggggactcttcggtacccgccagcatggagccaaccatcaccgccgccgcaccggcggcgatcgctttggcgatatcgccggagaaacggataccgccgtcagcgataaccggaataccggtcccttccagcgcttccaccgcgtcggaaacagcggtgatctgcggcacacccacgccggtgacgatacgggtagtacagatggagcccgggccgatgcccactttcaccgcgctgcagccggcttccgccagcgcgcgtgcgcctgcgccagtggcgacgttgccgccgatgatctgcaggtcaggatatttcgcgcgcgtttcacggatacgctgcagaacgccttctgagtgaccgtgcgaggagtcgatcagcagaacgtcaacgcctgccgctaccaacgcgtctacgcgctcttcgttgccggcaccggcgccgaccgccgcgcctacgcgcagacggccctgctcatctttacaggcgttcggtttacgttctgctttctggaagtctttgacggtgatcatgccgcgcaggtggaagctctcatccacgaccagcgctttctcaacgcgtttttcgtgcatcttagcgaagaccacttcacggctttcgccttcacgaacggtgaccagacgctctttcggcgtcatgtagacgctgaccggctggttcagatcggtgacgaaacgcacgtcgcggccggtgatgatgccgaccagctcgttttcttcggtaaccaccgggtagccggcgaaaccgttgcgctcggtcagctctttcacttcacgcagagtggtcgtcggcagaacagtctgcgggtcggtgaccacgccggactcatgtttcttcacgcgacgaacttcttccgcctggcgctcgatggacatgtttttgtgaataaagccgatgccgccttcctgtgccagggcaatagccagacgcgcttccgttacggtatccatggctgcggagagcataggaatattcagacgaatggttttcgtcagctgagtgctgagatcggcagtattcggcagaacggtagaatgagcgggaacgaggaggacgtcgtcaaacgtcagggcttctttagcgatacgtagcatgggcaatatctcgaccagggtggataaatattgccgtggcattatacagagcgtaaccgattgcatctacccttttttgcaaataatacttgccatcccctctgagcgcgttactatcgactgaataacctgctgatttaaagtttgatcttgctcacatgttaccctctcaatcccccgcaatttttaccgtaagccgcctcaatcagacggtgcgtctgctgcttgagcgcgaaatgggccaggtttggatcagcggcgagatctctaacttcagccagccttcttccggccactggtacttcaccttaaaagacgataacgcccaggtgcgctgcgcgatgttccgcaacagcaaccgccgggtgacgtttcgcccacagcacgggcagcaggtgctggttcgcgccaacatcaccctgtatgagccgcgcggcgactaccagattatcgtcgaaagcatgcagcccgccggcgaagggttattacagcagaagtatgagcagctcaaagcgcagttaacggcggaaggactgttcgagcaaaaacataagcaggcgctcccctcccccgcccactgcgtcggcgtcatcacctcgaaaaccggtgcggcgctgcacgatattctccatgttctcaggcgccgcgatcccgggctgccggtgatcatctacccaacctcggtccagggtgacgacgcccccgggcagattgtgcgcgccatcgcgctggccaacgcgcgccaggagtgtgacgtactgattgtcggacgcggcggcggttcgctggaggatctgtggagttttaacgatgagcgggtggcgcgggctattttcgccagccagatccctatcgtcagcgccgtcggccatgaaaccgacgtcacgatcgctgattttgttgccgacctgcgggcaccgactccctcagccgccgcggaaatcgtcagccgcaaccagcaggagctgctgcgccagctgcagtccggacagcagcggctggagatggcgatggactatttcctcgccagtcgccagcgccgttttacccagctgttccatcgcctgcagcaacagcatccacagctgcgcttggcccgccagcagaccgccctggaacgcctgcgccagcggatgcgtatcgccgtggagtcacagcttaagcgcgcagaacagcggcaaaagcgcaccgttcagcgtctgaatcactacaacccgcagccacggatccaccgcgcgcagtcgcggatccagcagctggaataccggctggcggaaattatgcgtggccgcctcagcgagcggcgtgaacggtttggcaacgcggtgacccatctggaggcggtgagccccttagccaccctggcgcggggctacagcgtcacctcggtgagcgacggtacggtgctgaagcagacaaaacaggtcaaaaccggcgatctgctcaccacccgcctgaaagacggctgggtcgaaagcgaagtgaagcagatcgcgccggtgaaaaaaacgcgggccagaaagccttcgcccactaaaccagcggaataaattccacccgttttttcgagataaggccatgcccatgctggcaaaagtaatccaccgcgccgcacgccttcagcacctccagcggctggtggcattccgggcagcgggcctcaagggtaaataccctttcgcactgggcgcaatgcgcgctactgcctttgacatctaacggcgcgtggcacagagggcaatcaagttccataaccattcctttcaacgtttatctgcacctattttatcatgttccgggtttaatgcgggccgcgtaattgctgctgcaacctgagcagccattccacttcctcaagcctacgctgcgttagcccggccacgctgtccggcgcccggataaacaaattatccgcgccgaggatctgctcatcaagacagtgcgtatagatcgccccgggccgggtccagcgctgcacccgctcgccgtcctgtagcgtcaccacttcgccctcaggggcgcgatcgagggtgattactcgcccgtcccgcagtcctattcgcattcccttttgcccgcccgcgggacccgcgtatttgttgagccagatattgagcgggatagtgcccagggttccctgcagatgcgccaccccctcggcagtgctggtatccccaggagcaatgtcatggccgaggcggtctttcgccacccgaagggaaaggctcagcgccgtatcgcttccgctggcgtgcagggtttcgcggagcatcgccaggacatgggtgccgatatcgaggatcaccccatcagggtgacgcagctgccgggtatccagctccccggtggcaaaattgagtgcgaccggctcaccagcgctgttaaagccgcttggctcctgcaaagagccttcgagccagacgatatcctgcgctgacaggtgcggcggcggcaggcggctggcctccccttccgctcgccaccgcgggtcaggagcgttcagcgcaacgcctcgcgccatccagtggtcaagagccagcacccgcgcggcctgctcaggcggcgccagcagcgcccgcagtcgggcggcctgctcaaggttggccacgatcggcttttccaccacgatgcgggaaatgccgctggctaacgccctctccagtacgggcagatgctgaagtgatgaggtggtaatgaagagcgtatccaggggttcggccagcagcgccgacagcgaactacagcgctggatccccggcagcgctctgctgcagtccaggtcatagccctggcagcggtcgatgacgtcccccaggcgacgcagcgccggtaaataggcggtttccaccaccgcgccgaggccgataaaaccaatctgcatagtaagtccacctttgagccgctctgttcccggcgaagtatcgcgggattatggcggaaggttttgacatttaccggcatggcggccacaaaaacccaccaatatgaatttcaactttgaattgatgtataaaattgtacctactacgagatacctggcattttttgcgtgagaataatggagtcatgcacaacaacggtcattccatgagtcgcggtagtaaatatttccgtccatgtatttccaggtgatcgcctcataacgcatctcgagcgtttccaggtgggtactgctcataccagtaggtgataaatacggcgcaaccgtagtgactttgacgttctccaggatgatgttgaaatactcggcctcaatgcccgcctccagaatgcgatacatctttataatcgccttcttcatcgggcgcccctcacacacggcacgatacaaaagcggtgttgtctgatcgaattccttcactatcgacacaggacgatgtattcgcgtacctgtcagttttccccagcttggatcaactggaatagtaataccatgagagaatgattttaactcaatagatccaagacgcgttggcatcatgcagcttccaatgatcggagaaccgttttcatcttcaagccataaatgtgcgggagtagacatacaatttccttatcataaataacgttagaattaccatttcacatagcgcccaaagataataatcataagtacagcgaatataccaacaggccaaaccggcccctcaggaaaaatttgaaaaaaaaccactgcaaatatgacaatgcaaagtggcggggcatacagcgaaattaattgctggaacaaccacaaaagcgctcttttaataaatgacatcatcactacctaatcattctttcgatgatattagcgagctctgcctctgaagcccattgggctttaaaagcgtcggcatgttcaaataatggcgccaccaggaaatacatcatttcaagttcttgttcgtatagtatagtaaagaatgcaggataacagattcggagacgctcagcgctatctgcagccctctgcacaacgccatacatgccagccactgtaacggcgccccccgcagaacgcccagcaatcgctcccatatcaaggcttagtttcatgcctaccgaaacacaggtagccgtagctaaaacaaatccagatttggttagagagtctgcagcgatatgaatgttaacagccatcagaattcttttaatatgctctaactgctctgggtaatgactccaacttattgatagtgttttatgttcagataatgcccgatgactttgtcatgcagctccaccgattttgagaacgacagcgacttccgtcccagccgtgccaggtgctgcctcagattcaggttatgccgctcaattcgctgcgtatatcgcttgctgattacgtgcagctttcccttcaggcgggattcatacagcggccagccatccgtcatccatatcaccacgtcaaagggtgacagcaggctcataagacgccccagcgtcgccatagtgcgttcaccgaatacgtgcgcaacaaccgtcttccggagcctgtcatacgcgtaaaacagccagcgctggcgcgatttagccccgacgtatccccactgttcgtccatttccgcgcagacgatgacgtcactgcccggctgtatgcgcgaggttaccgactgcggcctgagttttttaaatggcggaaaatcgtgttgaggccaacgcccataatgcgggcggttgcccggcatccaacgccattcatggccatatcaatgattttctggtgcgtaccgggttgagaagcggtgtaagtgaactgcagttgccatgttttacggcagtgagagcagagatagcgctgatgtccggcggtgcttttgccgttacgcaccaccccgtcagtagctgaacaggagggacagctgatagaaacagaagccactggagcacctcaaaaacaccatcatacactaaatcagtaagttggcagcatcaccactgctctgttgttttgtgcttaaatatttcttcaaaatatattttcagcatttcatatacaatattcttacgctgtaaaagatggtagatacctttagcaaatctaacatcctcattcttctgctttttacatacatcctgatactcatcagtaaaacaggatgtataatataggattcgagtaacgccagcacctattgttttaacctgaccggaaacccgttgttctatgcctgaaacagcgcgatcaagtttcattgcgagaattttattggcctgtaaatagctgatgacaacattgctgtaatacataatcgctccttgccgattaatttccccatcctgggaagaaccgcaatttaccacaatactcagccataaagtagactctccagtttctcccatattacagaagagcgacaccgtggattttctccgatatatccagatgcgttttctctcgtatcattgcgataactttctgcgtatatattatcatagcgtactcaaacaattgcttgagcaagcgaagctggcaaatgagaaatctcataggatacgtgcagatatacatgccaatcatgcgcgttgttgcgtcgctacaatcggccttaataaaaaagcccggcagagcgggctttgaaggattcatgttggtgggtaaatcttgctgatagcttatttgcttttcttgatgtgcttgatcaagcgcttacgtttacgcatctggttcggcgtcagggtgttacgcttgttagcgaacgggttttccccttccttgaactggatacggatcggcgtgcccatcacgtccagggatttacggaagtagttcatcagatagcgcttgtaggaatccggcagatccttgacctggttaccgtggatcaccacgataggcgggttgtagcccccggcgtgggcgtatttcagcttcacgcgacggccacgcaccagcggtggctgatgatcttccgccgccatgttcatgatccgggtcagcatcgcggtgcttacgcggcgcgtagcgctgtcgtaggcttcgcgtaccgattcaaacaggttgccgacgccgctgccgtgcagggcggagatgaagtgcacccgggcaaagtcgataaagcccagacgatagtcgagggtctccttcacctgctccttcacttcctgactgaggccatcccacttgttaacgacgatcaccagcgaacggccgctgttgaggataaagcccagcagcgagaggtcctggtcggagatcccttcgcgagcatcgatcaccagcagcacgacgttggcgtcttcaatcgcctgcagcgttttgatcaccgagaacttttccactacgtcggtgattttcccgcgcttgcgcaccccagcggtatcgatgagcacgtattcgcgctcgtcacgctgcatcgggatataaatgctgtcacgggtggtgcccggcatatcgtagaccaccacgcgatcttcaccgaggatgcgattggtgagggttgatttaccgacattaggacgcccgacaatcgccagcttgatcggcagatcctgcggattgaagtcgtcttccggctcttcttccgcttcgccattctgctcggcttcgaatttcgcccaatattcggcgtcttcatccacttcttcctgcggattaacctcatcgacccatggcagcagggcctgctccagcaggctggtcacgccgcggccgtgcgaagcggcaatcggatagatatcgcccagaccgagcgaccagaagtccgccattgcctggtcgacgtcgatgccgtcggttttgttagccaccaggaaggtgggcttttcacgagagcgcaggtgtttagcgatcgcgatgtccgccggcatcaggcccgcgcgcgcatcgaccataaacagcaccacatcggcctcttcgattgccagcagcgactgctccgccatccgggtttccacgccctcttccgtaccatcaataccaccggtatcgatacagatgaattcgcggccttcgacttcggcccgaccgtacttacggtcacgagtcagccccgggaaatccgcaaccagcgcatcacgagtgcgcgtcaggcggttaaagagcgtggattttccaacgttagggcgcccgacaagcgcgaccacaggtatcatgttaaatgcctcatacaatcactaagcaacatcgtcttaacgacgtttttaaaaaagtcaaaacggcccctgtctgccaggggccgtttcttaatcactcacgacagcggtaattaacgcgtaatcgcgtacagcgtaccgtctttcgcctggatcagcagtcgaccatcggcaaccaccgggtcggtcaggaagccggaactatcgactttctgctgcgccacaaaatggccatcttccggattaacccagtgcatgtagccttcgctatcgccgacgaccagattgccattatacaacaccggcgcggtcagcaaacggtgcagcagatcgctttgcgtccacagggttacaccgccgtcggtggtcagtgccagcaggcgatcgttctggtcaaccaggtagatacggttaccatcgacgatgaaatcattcaccgaacccagctcgcgtttccacataatctggccgctacgcaggtccagcgcggtcaggttaccgttataagccagcgcataaaccacaccgttaacgatgatcggcgtcgtgtcgacgtcgttcaggcggtcaatttccgtcgggccggtggccgtagaaatacgctgctgccaaatcatctgcccctgctgcatcaatactgcactgacgcggccgttgtcgccgccgacgatcgccgcgccgtaggcgatcgcaggcgcagactcgccgcgcagggagagcgccggcatatcgaggttaacggtccacttcacggccccatcggtctcgtttagcgcctgcagctggccgttactggtatgcaccagcaccatgccatcgctcaccaccggacgcgacagcgcctcgccggcgacacgggtttgccaggccacgctaccatcgctggtattcagcgcatacagctgcgctttctcgctgccgatataaacatggccgccagagacggtcaccccgccagaaagcagcgctggcgtgcgcgagaaccagccatctttctccgccagattcaccgaccacacctctttgccgtcgtcggcgttcagcgctttgacggtgcctttacggtcagcagcatacactacgccgtcggcaaaggccggatgaaggttagagtaaaattcgccgataccatcgccaaccgaggtgctccaggaagtggacggcgtaaactggttttctaccgtcggcagcggtgacattttcaccacatcttcttcgctattaaacagcgaacacccgctcagcaaggtaacggaaagcagccctggcaacagtaatttacgcaattgcatcgagtccctctcagatggacaaattattcattttcatacgcatcatttcgctgagcgcaggagaagcatcgcttttcacgccagcttcccacgccgcacgggccccttgcttatcgcctttgctcaacagaatttcgccgcgcaaatcggccacaatggcggtccagccctcacctttgatgctgtcgagggttttcagcgccgcatcagcctgtttcatttgcagctgaacgcgggccagacgcatactgataaccgatttcagattatcatcagatgcggccgccagcccctgctgcagctgcttttcagcgttcggcagatcgttctgttcaacaaaatgctgtgccagctcgagagaggcgaaggcgccgtaggtatttttattgtcagccgcgaatttctctgcccctgacagcacttctggcgtattcgatttcagcgcggaagtcgccttctcgtaagccagcgacgcgtctctggcggtatcctgctgatgggaggtccagtagcgccagccaaccagcgcgccaatccctaaaatcaccccgaccgccagcgctttgccgttttcggcaaagaaacgcttcagcgcatcgacctgatcgttctcgttgttaaaagtttccacgcagtccttctcctgactaataattcccgggagattaacccagaagtgtgcgcaaatgcgcggcaacgctctcctgcgttacggtagtttgctcacctgagcgtaaatccttcactaccacgtttccgtcagcaatctctgattcaccgaccaccagcgcgacgcgcgccccccacttgtcagcgcgggcgaactgcttcttaaagttgccgccgccgtggttggtcatcagcttcacgccgggcagcgcatcgcgaacctgctcagccagacgcattgcagcagactgagtatcggtcccggaggctaccaggtatatatcgacaacaggatcggctttaaattccggattcactgcctggaccagtaaaacaagacgttccagacccatggcaaaacccacgcccggggtagcgcgaccgcccagctgctcaaccaggccgtcgtaacgaccgccggcgcagacggtgccctgggaaccaaggctggtggtcacccactcgaacacggtgcggttatagtaatcaaggccgcgcaccaggcgctggttgacggtgtagcggatcccggcatcgtcaagcagcgcgcacaggccggcaaagtgggctttcgactcttcgtcaagataatcgccgagcgccggcgcgtcgttgagcagcgcctgcacgtccgggtttttggaatccagcacccgcagcgggttggtatacatccggcgtttactgtcttcatccagtttatcggtaaactgctccaggtatgccaccagcgcgtcgcggtagttggcgcgcgcttccagcgaaccgatggagttcagctccaggctgacgtgctcggagatgcccagctcacgccaccagcgcgcggtcagcataatcagctccgcgtcgatgtccgggccctgcaggccaaacacttcggcgccgatctgatggaactggcggtagcgacctttctgcgggcgctcgtgacggaacattggcccgacgtaccacagacgctgttcttgattgtacagcagaccatgttcgatgccggcacgtacgcagcccgccgtcccttccggacgcagcgtcaggctgtcgccattgcggtcttcgaaggtatacatctctttttcaaccacgtcggtcacttcgccgatcgcgcgtttgaataacggggtctgctctacaatcggcaaacggatttcgctgtaaccgtagctaccgagcacctgcttcagtgagccttcaatgcgctgccagagagcggtttcgcccggcagataatcgttcatgccacggatggcttgaatgttctttgccacgtttattctctttatatatacaaaaatgaaccccggcgcctcgcgcccgcaggttcaatcatacacgggaagcgtatcgcttcccaacacgttattttgcttcaacctgttgaacgtcaatccgacgggcttcatcgagcatcgaggctttggcgcggatccgcgcttccagctggtcgatcatgtcgttgttgtccaggcgatctttacgcacgccgtcttcatacaggccgcttttcttgttgccgccggtgacgccaagggtggagaccagcgcttcgcccgggccgttcaccacgcaaccaatgatcgaaacatccatcggggtgatgatatcttccagacgctgctccagagcattcaccgtaccgataacgtcaaactcctggcgtgaacaggtcgggcaggcgataaagttaatgccgcgggaacgaatacgcagagatttgaggatatcgaagccgaccttgatctcttccaccggatccgccgccagcgagacgcgcagcgtatcgccgatcccctcggacagcagtagtcccagaccgatcgccgattttaccgcgccgctgcgcgcgccgcccgcttcggtgatcccgagatgcagcggctgatcgatctgtttcgccagcagacgataggattccaccgccaggaagacatcggaggctttaacgctgactttaaactgatcgaagttcagacgatcgagatgatcgacatgacgcatggcggattcgagcagcgcctgcggcgtcggctcgccatatttttcctgcagatctttttccagcgagccggcgttgacgccgatgcggatcgggatgtttttatcgcgagcgcaatctacaaccatgcggatgcgctcttcgttgccgatgttgcccgggttgatacgcaggcagtcgacgccatattccgccactttcagcgcaatacggtagtcaaagtggatatcggcgaccagcgggacgttaacctgctgtttgataagtttgaacgcctcagcagcgtccatcgtcggaacagagacacggacaatgtccgcgcctacgcgctctaacgctttgatttgatttacggtcgccgccacatcggtggtgcgcgtattggtcattgactgaacggcgatgggagccccatcgccaattggcacattaccaacgtaaatacgtttagattttctacgttgaatcggagcctggttatgcatgaaaaatctcccgcgttacccgtctgttactgcgccggtgatgattcggcattgagggtcagacgcgcaacctggttagttctgataaaacgacttaaatcgacaggcttgcccagatactggatctgtaccgcggccggggcgccaattttcagcttatacggcgcctgaccgctcaggttcaggttaccgcctttacgctgcaggccgctgaacagttttttaccggtggcatcgctcacttccagccagcagtcggcggaaaagttcatcaccagatcctgcgccgacgccgccggagtcgtgacgttcgcctgatcggtcggcaacggcgaggctggggtggtagccggagctgccggcgtcgtccccgcggtatcgacattggcctgggaaggcgccacgacagcgttattatctgctggcgtctgggccggcgcgctggtggtcggtgcgctggcggtatcggttggcgcgctgttcgcggcgctatcggcggtcggggctgcaggggcgctggtatccagcggcacgttctggctgttggcgtcgccgccgttcagctctgcggaagactgatcggccatagtcgaaatctcttcctgctgcgccttatggtcttgccaccaccaggcgccgctcagaccgataaccacaaacagcaccagccaggtgaagctcatcagccagccgtcgcgctttttgcggcgcttgcctaaagagaaactctgcattggcgcgactttcgccgcgcggatgggcgcctgcttggccatcatcggcagcagctcgtcttctggaatatgtacgaggcgagcgtaggagcggatgtacccgcgcaggaaggtggaggcgaggtcggcgggggccttatcgtcttcaatatcacgaaccgtggacaccttcaggcataagcgttcggccaccgcttgctggctaagtccgagttgttcgcgggcgtgacgcagacgcgcgcccgtggtgtttgcttcttgatgatcttgagtggcttcagtattcattcgctacaactactggtacgtgaaatttaaagttcagcgcgggaaaaagccggcgccgcgagacatctgtgctacgtcagccccacagtataggactgtcagccgcgcgatcacagagacgaatcaaaattgaatgctaagcggttgttgtgccgctacatactgcctcaaagtcgacaaaaacgcaccgtaattattaaccgaatcagcgtatttcgcctggctatcggccataaatatgacccgtgccgcctgcgctgcacgggtcatcatttgtcagaccgcttttacgtcaatcgcttcgccctgcatccgcttacgcagcgtacgcttggtacggtcaatgacgtcgcccgccagctggccgcaggcggcatcgatatcgtcgccacgcgttttacgcacgatggtcgtaaagccgtactccatcaggactttggagaaacggtcgatgcggctgttggagctgcggccatacggcgcgcccgggaacgggttccatgggatcaggttgatcttgcacggcgtatctttcagcagcgccgccagctcatgggcgtgctcggtgccgtcgttgacgtgatccagcatcacgtactcgatggtcacccggccctggttggcgttggacttcgaaatatagccgcgcaccgagttgaggaacgtctcgatgttgtactttttgttgatcgggacgatttcgtcgcgaatggtgtcgttcggcgcgtgcaaggagatcgccagcgcaacgtcgatcatatcgccgagtttatccagcgccggcaccacgccggaggtagacaaggttacacgacgcttggaaaggccaaagccgaaatcgtcgagcatgatttccatcgccggaacgacattgttgaggttcagcagcggctcgcccatgcccatcattactacgttggtaatgggacgcacgccggtggtcttcaccgcgccgacgatcttcgccgcgcgccagacctggccgataatttcggatacccgcaggttgcggttaaagccctgctgggcggtggagcagaatttgcactccagcgcgcagcctacctgggaggagacgcacagggtggcgcggtcttcttccgggatatagacggtctcgacgcgctgatcgccaacggcaatcgcccatttaatggtcccgtcggttgagcgttgctcttcaaccacctccggggcgcggatctccgccacttctttcagtttactgcgcaggactttgttgatgtcggtcatctcatcaaagtcgtcgcagcagtagtgatacatccatttcatcacctgatcggcgcggaaaggcttctcgcccatgtttttgaaaaactcgcgcatctgctgacggtttaaatccagcaggttgattttggcatctttgttcggcaccgtcagagcggcggtatcaggcgtgacaatttgttcagacataatattttccggcctcgttattacacgttatggccccaggtgggttgaaaaagaaacgccccggagagcgactgctcgtccaggggcgctatattctacaaattctggcgcatggaagccatgcctgcgcgcagtcaatgatgaaaaaatctgttactgactgctcaatcctctaaggcttttcgattgtcaggccaacgccgcgacgatcgaaaagacgaggtttatatctccaaagtatttcaggtcaccgcgaggcggcgaattcgcacatccccgggagcatagataactatgtgaccggggtgcgcgaatgaagccaacaaagcggtggcgtgaaagacgcaggagattagcgagtgcgcgggcaaacctcgccttcagcaaagaagaacgcgatttcgcgggcagcggattctacagagtcggaaccgtgggtgccgttctcggtgaagctgtcagcgtagtcagcgcgcagggtacccgccagggcgtttgccggattggtggcgcccagcaggtcacggtgacgctgtaccgcattttcgccttccagaacggaaaccacgatcgggccggaggtcatgaactcaaccagaccgtcgaagaacgggcgaccttcgtgctcagcatagaaaccacgagcctgttcaacggtcaggtgcagcattttggtgccgacgattttgaaccctgcagcttcaaagcgggaaaagatgctgccaataacgttttttgccaccgcgtttggtttgatgatggaaaaagtacgttcaatagccatgattacctctaattaaatgttctgttgttgcacatacgattgtatggcctggcgcgcattataatgagcatccccgcccctgcctacggatgaaggtaacattttgttaaaataagatgagtattgaaaacacaaaccgccaacaacaaattcaccctggttattgcagggtgaagctggcggccgccgtctgacccgcttcatccatcaccaccaactgccactcgccgggtttatccagcattagcgtggttcttgcgccggcggcctctaacggttcgccattaataaaccaccagcgccgcccctccccaccgctggtttgtagcggcaacatcacccgcgcctcacccgggagacgttttatcaccgccccatcacggatgccggacagcaccagcggcgcggtatcctgagtctgtaacggcgggcatgactgcgatgccggtcccaggcgcgcgcgccgcctttcgctggccggcagccagggatccagcggcagcggccagacttcgacctggctttcccgagcgccgggacaatccgccgccacccgttcgccgtgttcattgcgccacaccgggaagcggatcccgcgtacgctctcctgccccggcagcagcagagtcggcggctggctggcatccaaaagccagctggccaggcgacgacgacagttgctgtcgcccgccggcagatcctgcccgccaggccagcagattgtcccctggctgaccgttgccgggcgcggatcgctcggcagcccgccgcggctcatcgccgggcgggccagcagcagattattgacctggttgagcagcggtacggcgctggcgaagccaaactggcccaccaccggcgtaccgtccgggcgcccggtccagatgcctatcagatatcgcgcattgaggccgaccgcccacgcgtcgcgatagccgtagctggtgccggttttccacgccagcggcaccgcctgcggcagcgaggcatcgggaaccggttgcgcttcgccggccaaaatacgccggacgatccatgccgccccgggcgacatcagcgcgcgctcggtcaatggatcgctcggcttcaggcgcagccgcgccgccttgccatggcgggcgaaggcgctgtacgccgcgacaatatcttccagccgcgccccggcgccgccgaggattagcgacagattcggctctgcgccagcgggcagcgtcaggggcagcccggcgttgcgtaaattagccgcaaagcgttttggtccataggcttcgagcacctgcaccgccggcagattcagcgaccgcaccagcgcctcgctggcgctcaccgggccatgaaacccgctgtcgaaattaccggggcgataatcgctaaaacgccgtggcacatcctgtaatagcgatgccgggtgaatcagcccctcatccatcgccatcgcgtagataaagggtttcagcaccgaccccggcgagcgtaccgccgagaccatatcaatatggccgaagcggctgtcgtcggtgatatccgccgagcctacccagccgcgaactttcatatccgtgtggtcgacgacgaccatcgccagcgaactgcgcggcggcaggcgcgatttccagttcagcgccagatcttccagttgccgctgcagtccggcatccaaagtcgtcaccaccttttcatcacgactggtcgccagcgcccggcgtgaaaaaagcggcgccagctgcggcatctggcgcggaaacagccatactggctcctccatcgcttcctttaccgcctgctccggccagacgccctggctgagcattcgcgtaagcactttatcacgcgccgcctgggcccgctgcggccagcggtccggacgtaaacgactgggcgcctggggaagtaccgccagcagcgccgcctcgccgtagctaagccgggcaggcggcttaccgagataggcccagctggccgcgccgatcccctgcagggtgccgccaaacggcgcgcggttcaaatagagggttagaatgtcgctttttgacagatgccactccagctgcagcgctcgccacagctggcgcagcttgccgccgaaggtgcgtggatggggatcaagcaggcgtgccacctgcatggtaagcgtgctgccgcccgagataactcgcccggaagtaagatcctgccaggcggcgcgcagcaccgcgaagggattgacccccggatggcgccagaaccagcggtcttcatactggatgagcgcctgcagatagcgcggcgacacgtcggcgagcgtgaccggataacgccagacgccctgcgcgtcggcaaaccgccacagcggcgtcccgtcttccgccaccaccacacgggcaggcgtgacgtcatgcagcggcagcggccacaggcgatcggccgccagcaccgccagccacagcagaaaaataaacgccgccagccagcgccagcggcgttttacccgaggcaatacgcgcatttacggcgtcacggtgagcggaccgctggccgctcctgtcgcccgccactgcggcgcatacatcgattccacctgcggctgcgggacctgataagtgcccggcgtcaccgcccgcgccagatagaccagcgtcaccggctggccttcattgacagcgacggcggcgacaaagcggtcatcgcggaactcgatatgctgaatatccgcctgctgcatctggttaagcaggttttgcaccgcgtcgccattctcctgcaggctggcgctgctgttggccagattctggttttccagctccagaccggctggcaacagatcaaccaccagcgcgtcaggcacgttgcgtttggcggtcacctccagcttgacgagcaccagttcgccgctgcgcagtgaagacagcgatttctgctgcccctgggtatcgaaaatagtgcgttcaatccccaggacgttaccgcccggctgcggcgcgctttgcggatagccgctgctgtcgagacgcagccacagcggctgactgccggtattactcacctgcagcgccgccagccgatcgccgtcgaggttgcgggtttgcgctttgtcgccggccaacggctccgcctgcagcgaggttttcgcctgccagctgcccggcaggtccgccagcgtacgtccggcaaggaacaaggcgttggtttcctgggtcgacagccagcgctggccataggcctcttccgacagcgtgctcaacagctgattttgcacctccggcagcagtttattctcttccagcagcgccagcttcagggcgttatcgcgcagcgggctaccgtaatcgcccagccaacgattctcatcctggcgcggggtggcaaccgccagcttcagggcggcgtcgccgcgcggcgcatcgcccatggttttcagcgcaatgccgagctgcagcagcggcaagccggatcgcgcctggtcgtgacggctccagatttcacgcaaggcgccgagcggcgctttttgctgacgcgccagcaccagcgcggcgtatgcctgagcggcaaagcggctagcctgggcgtcgtcgctgtagcgcacggtcatcaggcctggctcctgcagatagcgcagtaggcgctcgttgcctttattaatggcgttgaccggtacgctatagccctgctcgctggcgcgcacgaggaagtccatggcgtaggcggtcagccagtactcttccggcccctctctatcccatagcgcaaagccgccgttttccagctgcatctgcagcaggcgtgaaataccgacatcgatggccgcgcggcgtttttcgtcgctgtccccgctaatgcccagcgcctttagctgcgccgcgctggtatacagggacgggaacaggccgctggcggtctgctcaaggcagccgtaaggataggctttcagctcgcggatatagcgggcgagattcaacggtggtttaccgctgagcagcagttggccctgcagcgtttgcggggcaaagccctggctctgcgccgccggcggctgccagctttcacctggctgcagcactgcgccgctgttgacggtctgtgccgggtacgccggacgcacgccgattttccactgtttttgcagcggggcgaaggtttcgcccggcaggctcaggccgctgatggtggcattaacctgaccatcgccgaagcccgccagcgcgctcactggtataaacagcgtgctgcgcgcccccggcgccagttgcaccggcggcagttgaccctcggtcaaggtcaccagcccgctggcggtaagatgaacctgcagggtttgcggtttatcggtcagattgctgagatccagcgccagccgtgtggtatcgccgctggcgaggaagcgcggggtgttcagttcggcgatgaccggggcggccaccaccactttatcttcgctgctgccgaagtcatccgccgtccacgcctgggccatcacccgcagctcgccgttaaaatcgccaatgggtaacgtcaccgtgccttcgccctgatcgttcaataccaccggctgcgcctgctgggcgacgatcgtcacgtggttgaccggcggtttgccgccgcgttttaactcgtcgccatcgccgccgaagcgcaggctggccacccgcccctgcccttcgatcacctggccgtagatgtcatagatatctgcgccgtaacgcttctggccaaagaaggcgttccacggatccggggtagcgtaatcggtgatattcagtaccccgctatccaccgccgagagcaggacattgacctgtttcggcgcctcgccctctttgacgctggctttcactttcaccgtcagcggctggttggggcgcattttgtccggggcctccagcgccagcgtcaggcgacggttttcatcgcccagcggcagatgcagcaggcccaccgcgcgtttcggcgttgccgagcgcgatttatcgccgggacgaaccaccagcgtgctgaggtagaggtcgtggcgattccaggttttatccaccgggatcgacaggtccatcccctccgccgggacgtcaatttcctgccaccacagcggcccttcgctggattccaccattgcgtagcctttacccgccgccggggcggcgatgtgcagcctgatggtgtcgcccggtttatagctcggtttatccagcttcatggtgacccggtcaggacgcgccgcgccggcgccttcgctgttatcctgccagctgtagcccgcccagaagcgcacgctgctgaccacgtcgtccggtcctttcacctccaggcgataggatccccactccaccgggaagctcactttgccgatctggccggcctgcaggtccagcgactcctcgccctcctgcagatctttttgatcgaactgcgactgccaaccttcgctgtcggaccagttccagtagtagtcgcgccgctcgcggatcagccgcacctggagaccggagatcgcttttttctcgcctttgacgtcggcatagacgatatcaaacgcggcgttactgttttcatccaccaccggctgtttgacggtggtatcggtgcggtaatcgtaaacgtccttcagcgtaaattgcgggcggatccccggcagcgcctcggcgggccagatcggctgcttaaccgtacgggtcaccgggcgaccgccggattccagcaggctggcctgcaacaccacctgcagcggcgaatggctatcctgccactggcttgaggtggtcacttcgccatggcctttttcgtccagcgtcagctggacttcatccagactacgggagaggttttcttccgcaatatcgccgaactggaagcccggcagcgcagcgacggcgtcgcgcagcgggcgcaggaacagcttgccctgcagctggttgccgctggccggcgcgccgtagagataagcgccgctaacgccaaaggtgacgtcggcatccggcgcgactggcgcggcctgcggcgtcaggttcagggccatgcgttccggcataaagtcttcaacgtggaaatcccattcgcgcggctgattgtcgccggcgctggcgcgaatgtgccacatgccggtagccgcgccgctgtcgagcggataagtaaactggtacaggccattcactggtttgctcatcaccgagcggatcacctggccgtccggctgaaccacctcgagtttcaccggctgctccgccagcggcttgccgtcgctatcgcgcaacagcgcattaaggatcaccgtttcgccgggacgatagagatcgcgcgggccaaacataaagaactgtttgctaaagccgggcgcgcctgcgatagagaattccgccagatccagcgccggcagcttgaggtcgagcagcgtggtctgcccctctttgcgcgccagcagcagcgcggcttctttatcggtttgcagggtgacgtggccctggctgtcgcttttcgcttccgccagggtctgccctttggcattgagcaactgcacctcaatgcccgactgggcggcgccgttttccagactctgggtaaaaacgtccagccggttatggtagcgatgcgccgagacgccgatatcgctgagggtaaacagcgtcgccgcgttgctgtagctataacggcccgccgggttcatgaccgccacgtagacgccaggctgctggagcggcttgatgtcgctcagcggcagcagcagcttttcgcgagtattacgcgccgggttgagatcgaagcggccgctgtagaccagatccgccatcttcagcagttcatcagattcccagttgcttaacgagttacggtattcccactgactgacaaaggcggagagcgattccggcttaatgcggaagaaattaacgtcgacattatcgacgttcagcgccatcaccggcagcccggcgaccacgttgcccggcagcagcgagccgcggctggcaaacccaacgctcggtgcgatatcgcgggtggtcagggtcttctcaaacggtttgtcgagcgtcgccttgttcagggcggtcagcgtcgggtcgaccgagacaatcagctcgcgctttggctcaaggtgacgcagacgcagctctttcagattcggcgccagctcccaggcaccgtccaccttaccgcttttcttgtcgaccagatgcacgctgcgggagaaatcctggtccggctgcagcgggacggaaaacgtcagcaccagggtcgcggcgccatccagttgcacctccgaggcgtcgaggagcgtcagcgctttaccctggcttttttccgccagcgccgccagctgggcgcggtccggttttgccgtcgcgcctgggttgctatccgcggctggcgccggggccgaggcctgcggtgtaccgctgtcatcacacccggttaatgaaaatgcggtaaggagcgctagtgatagcgccgctaaacgaaatggtttcatccttctaacccctcggccgatgagcctgatgcaatttgtcacatttattatgcgttatggcggcgcttctcaacagtgacgaagcgggtttctgccgattaatcagaaaagtgccgtgacgccgtccccactctggcgtccttaacttgtcagcgccagctaaaacgccgacaattcagtcatgaataataaaacggaggcacctatgtccacctcgttttttgtcgctgccgactggctggcagaacatattgatgacccggaaattcagattatcgacgcccgcatggcgcccgccgggcaggaggccctgcgggatatggccgcggaataccgcgccggccatgtgccgaacgcgctgtttttcgatattgaggcgctatccgaccacaccagtccgctgccgcatatgatgccgcgggccgaagcgtttgccgtcgccatgcgcgaactgggcgtctgcagcgataagcatctggtggtctatgacgaaggcaatctgttttccgccccgcgcgcgtggtggatgctgcgcacctttggcgtagagaaggtgtcaattctggccggcgggctggagggctggcggcgcgacgaactgccgctggaacaagggatgccggaagtggccgaaggggaattcgacgtgcggttcgatcctcaacaaattaagcgtctgaccgacgtcctgttggtcagccatgaaggatcggcgcagattgtcgatgcccgtccggcggcccggtttaacggccaggccgacgaaccgcgcccgggcctgcgccgcgggcatatccccggcgcgctgaacgtaccgtggacggatctggtgattaacggcgaactgaaaaccgttgacgagctgaacgacatctttttacgtcagggtgtcgattttgaacggccgatcatcgccagctgcggctcgggggtgacggcggcggtggtcgtgctggcgctcaccacgcttggcgtgaacggcgtctgcctgtatgacggctcctggagcgaatggggcgcgcggagcgatctgccgattgaaccggcccctgccgctccgtaaacacagcgtgaccgcgggcctcccgttccgcggtcactaaataatttctgattttctctcccactttcttctgcttctcgctaaaccggttactctgtgctgccgcagggtttgttcctgccgtattcgctttactgccactcactatataaggaaattgaataatggcattttcattaccggatctcatggatgtcgtacataagtacaaccgcaatcccactccgaaaccgattcccgtagacgaagtggatcgcctgcgggtacggaaatatcgtgacccgcaaaatagcgaaaccgtggcgcttccggagagtctgaaagcgctgttggcctacgattgccaactgaaaagcccccacggacagctggtactggaatgggttgtggactccattgatgaacatggcgtcctgctttccgactcgctggatgaagatgcttattacatgaatggtcttgatatggccggactggactttgaagagctgatgcccgtctggaacgacgatccgcgtcttcctgccctgattcgcatcagccacgccggcgatcagcaggtatttatctatgtcactgaacgtgatgaacagggtgaatatcctgttgtccgcttcgagggtaaagagaatgatctctggctggcagaatcgtcactgattgaatatctgcaggggatctttgccggcagcgaggagagtcacgacgaatggcagcatcagcagaccctcaatgaggcacgcgatggcgccttgctggagctggaatatattcatgaggatctttacgccaggctcgaaggctgtcctgactaattcaccatctcaccccggatgacgcgattaacgcgcgccgccggggcctgctccaggagggagcgttttatccgtaacctgatgtcaccacaaggagtgaaaatggcattagtctctaacccacattcggcttattcaccgcgccttccctggctgggaggtatagctggcctgctggcaggcggcgcgatcctttatttttggccgcaatggaaccggacatggctaagcctggtgcctgcgccagtctccgtgtatacccgctttctcggggtcactctcgaagacgttccgttagtcacctattgccatcaggcgctgctgggttttctgatggtgctgctcgcgcccggttacggtaagtcgacccttgccgcgtggatgatgcataacccagcgtcaagccggcgctggcccggcgaggtattccgtgcctgggtcacaaaatttggcctgctggtcatggtcttttgcaatctgttctttttgtcccgggtcccatccggaaccctggcgttatacatttttattctccagcacatcagcgttgccgcggcggtggcgtcaggggtgctgctcctgcgtgacgcccggcgcctggcccgcacgttcgacgctcagctggcggacctgcgtcttctcatgatacttaccctcgggttccagacgattttgccggcgcagatcgcgctgatgagcgcccggggcgtgaatacgccgctgggctggtacattgttatcgcgcaaatggcaggggtgttactggcgtttatgctggtcggcgggctggtggcagcgctacgttctctgctgggcgaagagaggtgccgggcctggcgcggggatatggcgctcttcaacggcattgtcacactgtgcgtgacgggatttctcctctatcacatggtgtctgcctatccgcgaatctttgccgccctgcattagcttttgccaccccgcttttgtgcctcgaactggaagcagaaagaaacagcgggggctgccgcccccgctgtcagataatgcggttctgcttaaaatcgcgcaggaagctgccccagcgcttttcatagaacggcgtgatatgggcaatcataaagtggctgatgcccttctcgccttccaccacctggcaaatatcgatcggttcgtcgcctggcaaggtatcggtggccacgctgccggtggtctggataatggcttcaatatccccttccgcttccgcttcaatcccgatcaataagtttgccggcgcgtcggcgcgctctttaatcgagcacagaaacgcccgcttgacggtcttcagcgttttgaacaacgtggtcagcgaatcgaccatctgcgccggcggttcggcgacttcagacagcagcagcgcttcgccgccttccagtaccgtctgggtgctcagtgggctgccctcttcgcctaacagatggctgatttcccgtggggtgaactctttgccgctcggcagcttcgggttgaggaataacgattcgcccagcgtcatcgccatcagcgtgcgggccggcatcatcacgaaagcctgttcatccgccaccgcctgctgcagcgcctccagcgaggtaaagaatgggatcaccgaggtaccgtcgtctttttcccaatgctgcagatccagcgcgctatcttcgacaatctgctcgccatcggctgccctgcccggcacccagacggtggcctccagcagcgcgctgaaaaatgccggacgatgggcaggctcagtcgccgctttttccagcagggtttctaattcattttttgtatctgacatagtttggctacttcacaatgaattgcccggcggccattcgtccacgcgggcatatggttttcctggccgggtaagcgcagcgccacccggcaaggccattactcagctgtcagcaggttagcaatggtacgcacgccaagcccggtggcgcccgccgaccactgctcaacggcagatttgcggtaggttgccgaacagtcgatatgcagccaaccctgatggtagttttccacgaagtgggacaggaagcccgccgcggtgctggcgccggccggataggccgcgctgccggtgttgttcaggtcagcaaagttggacggcagctggttgcggtggaactcggccagcggcagacgccagaaggcttcgttttccgcctgagcgctcgccagcaggcgattcgccagcgcatcgtcaaagctgaacagcgcgtggtaatcattgcccaacgcggttttcgccgcgccggtcagggtagcggcgtcgatgatcagctctggcttctgcgccgaggcgtcaatcaggccatccgccagcaccaggcggccttccgcgtcagtgttcataacttcaacggttttgccgttgcgataatgaataatatcgcccagtttgaaggcgttaccgctgatcaggttgtcggcgcagcacaggtagagcttcacgcgtttgttcagcccacgggtaatggcaaaagccagcgcgccggtgatagtcgccgcaccgcccatatcggatttcatcgaatccataaaggcgctttgcttgatgctgtagccgccggaatcaaaggtgatgcctttgcccaccaggcaggcgtataccggcgcctctttatcgccggtcgggttatagtccagcgccagcagaaccggcgggcgctcggagccgcggcccacggtatgcagaccaagatagccctgctcgcgcagatcttcgcctttggtgatgcgatagcttatcttctcacccgccacgccgcacagcaggtcgacagcgcgctgcgccagctgctccggacccagctcttccgccggcgcattgatggtgtcgcgcacccagtcgatgatcgtcaggcggttatccagctcgctgcgctgcgcgtcgtcaagggatggccattcgacctgacgctgacctttcggccctttatagccggcccaaaaggcccaggcgcgatcggtgttccagccttcgccgctcagggcgacgtgcttgatgcccatgccgtcaattttgcgcgccgcgcgctggataagcccgaggtcgtctttaccgttgagatgtagagcgatgccgtcgttattgatgctccaggtcgctttttctccccagcgtccatcggctggctgagtagaaagcgtaatcttcatagcttcggtcattatcattatccttcttagcaaacgggccaccctatggcagcccgttaaaatgttttcgcttaacgcgaaattattcggcctcgtctagccagactagcagaatcgcctcgagaattttttcattggatgcgtttggatcatcatcaaactcttccaaatcgcaaatccactgatgcatgtcggtaaagcgaacggttttcgggtcgagatccgggtaagcgtcgtacagcgcttcgccgatttcgcgactgtcggtccatttcagtgccatattagtgctcgcgtgcgtggttgatggtgtaacgcgggatctcaacgaccagatcttcgtcggtgacgcgcgcctggcagctcagacggctgtcaggttccagcccccaggctttatccagcatgtcgtcttcatcttcgctactttccgccagcgagtcaaaaccttcacgcacgatgcagtggcaggtggtgcaggcacaggatttttcgcaggcgtgttcaatttcgataccgctacgcagcgcggcatcgagaatggtttcaccggtctcagcttccacaacgatgccatccggacacaggtcctggtggggcagaaatacaatttttggcattttaaacctcgtccacggattggcctttcagcgcgatacggaccgactgatccatacggcgagcggcgaattcctgggtttgtgtgtcgatatttttaatcgcttctttaatcgcgtcagcgtcgtcgcctgccgcggcggcgcgtacctgctccgcagcggcatcgatggcctgacgctccgcggcgcttaacagcgcggcgtcggcggccagcgcgcttgtcaggctctccagcacgcgcgcggcttccactttctgttcagccagcatgcgcgcctgaatatcctgttcggcgtagctcatcgaatctttaatcatggtggcgatttcgccatcggtcagaccataagacggtttcacctggatggaggcttccacgccggtcgatttttccatcgccgtaacgctcagcaggccatcggcatccacctggaaggtaacgcgaatatgcgccccgcccgccggcagcgccgggataccgcgcagcgcaaagcgcgccagcgaacggcaatcctggaccagctcacgctcgccctgcatcacgtgaatggacatcgccgtctggccatctttgaaggtggtaaactcctgcgcgcgggccaccggaatggtggtattacgcgggatcactttctccaccaggccgcccatggtttccaggcctaacgacagcgggataacgtcgagcagcagcagttcgctgtccggcttgttgcccaccaggatatcggcctggatcgccgcgccgatggcgacaactttgtccgggtcaatggaggtcagcggagtgcgaccaaagaactcgccaacgcgctcacgcaccagcggcacgcgggtcgaaccgccgaccatcaccacttccagcacttcttgcgcttcaacgccagcgtcttttagcgcccgacggcaggccatcagggtacgttttaccagcggggcaatcagatcgttaaactggctgcgggtgatatcgccctgccagccgccgacctcgacgtgcgctgcctcggcatcgctcaaggcgattttcgccgcgatggcggcatccagcagctcacgctgcagacggttatcgctgcggtcgctgaagcccgcctgctcgcgcaggtagtcagccagcaggtgatcgaaatcatcgccgccgagagccgagtcgccgccggtggccagcacttcaaacaccccgcggcttaaacgcagaatggagatatcaaaggtgccgccgccgagatcgtagaccgcaatcaccccttcctggccggagtcgaggccgtaggcaatagccgccgcggtcggctcattgagcaggcgcagcacgtgcaggcccgccagacgcgccgcgtctttggttccctggcgctgagcgtcatcgaagtaagcgggaacggtaatgaccacgccgtcgagttcgccggccagcgcttcggtcgcccgggcggccagcgctttgaggatatcggcggagacgcgaatcgggttcagcaggccgccggccgtctggatcatcggcaggccgttttcactggcctgcagctgatacggcagatgcgggtaacggttttgaatatcggcgagggagcgccccatcatccgcttcacggagctgatggtattggcaggatcctgagcggcgttaagccgggcgtcatagccgacggtcagccccgaagcgtggtagttcaccaccgacggcagcagatagcggccttgatgatcgggcagagtctcggcctggccgctacgcacggtagccaccagagaattggtggtgcccaggtcgataccggccgccagacgacgctggtgcggcgcggcgctcaggccgggctcactaatttgtaataaggccataattgcttccgaaaattaaaaatcgagcagtttttcttcgagttcttcagcactgctgcgcagtttatcgaggaaacggagcttacgaaccgtgtccgccgccgcctcccagctctcattatgcaattggtcaaccatcagctgctgacgggtatcaaacagcgctttcacccgtttgataaaaccttccagccgcgcgtcgtctttcgcctggccgatctcatccagctcttcgcgcaattccagctgttccatcaggaacgcggtatcgcgaacggtatgctgctcgctggccagatcgaagccatgcagcgaaaggagatattctgcgcgagtcagcggatggcgcagcgtctgccaggcctggtttatagtggcggaatgctgaaccgccgcaagctgttccgccgcaggcgcgctggcaaatttatccggatggtactggcgctgcagatcctgataccggacagccagttgttcaagcgagagggtatagctggctggtaacccgaagagggtgaaatagtccatagtaacctcagggtcatgcatctaaattaaaaccccacgcgcggcgtgaccgcggtggggttgaggagtaccgattatacgttaaagctttcgccgcagccgcactcatctttgacgttagggttagtgaatttgaacccttcgttgaggccttctttgacgaagtccagctgagtgccgtcgaggaattgcagacttttgccgtcgatcacgaccttcacgcctttgtcttcaaacacggtgtcttcagccgccggctcgtcaacaaactccagtacataggccatacccgagcagccggaggttcttacgcccaggcgcaggccaaaccctttaccgcggttcgccaggaaggcattgactcgcgctgctgcactgtcgctaagagtaatcgacataacaaaacctcaactaattattttgcttcacgtttgcttttgtaatccgcaatcgcggctttaatcgcgtcttccgccaggatcgagcagtggattttcaccggcggcagttccagttcatcggcgatatcggtgttcttgatcgcctgcgcttcgtccagcgatttgcccttcacccactcggtaaccagggagctggaagcgatagcggaaccgcagccgtaggtcttgaagcgcgcgtcttcaatgataccttcattgttgactttaatctgcagcttcatcacgtcgccgcaggccggcgcgccgaccatgccgctgccgacgttctcgtcgctgttgtcaaaagagccgacgttgcgcggattctcgtaatgatcgataactttttcgctgtaagccatgatgaattctccttattggtgccgaattagtgatgtgaccattcaatgctgttcagatccacgccctgtttgaacatttcccacagcggagaaagctcgcgcagacggccaatggatttgcgaatcagatcgatggcatagtcaatctcttcttcggtagtgaaacgacctaaagagaaacgaatagaactgtgcgccagttcatcagtcatgcctaacgcgcgcagcacgtaggatggctcaaggctcgcggaagtacaggctgaaccggaggaaaccgccaggtctttcagcgccataatcagcgactcgccttcaacatagttgaagctgacgttaagaatgttcggcgcgccctgctcgaggtcgccgttgaggtacacttcttccatatccttcacgccgttccacagacggttgcgcagcgtgcgcagacgcgccatctcgctttccatctcttctttggcgatacggtaagcttcacccatgccgacgatctggtgaacaggcagagtaccggaacgcataccgcgctcgtggccgccgccgtggatttgcgcttcgatacgaatacgcggcttacgacgcacgtacagcgcgccgatgcctttcggaccgtagattttgtgaccggagaaggacatcaggtcaactttcagctggctcagatcgataggcagcttgcccacgctctgggtggcgtctacgtggtaaatgataccgcgggcgcgacacatctcgccgatggtagcgatatcctgcaccacgccgatttcgttattcacatgcatgatggaaaccaggatggtgtcgtcacgcatcgctgcttccagctctttcagatcgataatcccgttgctctgcggcgccaggtaggtcacttcgaagccttcgcgctccagctgacggcaggtatccagaaccgctttatgctcggttttgctggtgatgatgtgcttgccttttttctgataaaagttggctgcacccttgatcgccaggttgtcggattcagtcgcaccagaggtaaagacgatttcgcgcgggtcggcgccgaccagctcggcaatctgattgcgggcgatatcaaccgcctcttcagcctgccagccaaaacggtgggaacgggaggccgggttaccaaaggtcccgtccatggtcaggaactgcatcattttctcggcaacacgcgggtccaccggcgtggttgcggagtaatcgaggtaaatcggtaatttcattgctcttaaactccgtacatcactcaatgcaaggaatcaggcaaccggcttgatgtacgaccgagtacacggaatgtcggagcatcccggcctgattctgaaagctctttataatcgttgtcccgccgtttcgcgccgccttgccctgtcagccgcagcccgaaacgggacgggtcactcaggcgcgcagtttaacgtcaatcgcgtcctgggtgcgcgcattgcgctgggtttcgtgctgatgctgacgaccggaaacatcgaggatctcctggttattcaccagttccccgagggtgatattgttcaggaagccggtcaggcgctcgctcaggtcgcgccacagcgcgtgagtcaggcatttatcgccgccctgacagccgcccttgccctggcaacgggtggcgtcaacggattcatccacggcgctaatgacttcgccgacggcgatactgccggcatctttacctaacagataaccaccacctgggccacgaacgctggaaaccaggccatttttacgcaggcgagagaacagctgttccagataggaaagcgaaattccctgacgctctgaaatatctgccaacggcaccgggcccgtttcagagttgagcgcaacgtcaagcatcgcggtcacggcataacgccctttagatgtcagtctcatgtcttacttaacctcaaactcgcccctggccgggctttttattaatatgggtattgcatagcagggccaagtctgacattcccgagtaatttggtcaactatttacttgactgttttagtcaggtatttggctttccgtgccgttttacttccgcatagcctgataccttcatcgcgccaggcgagcccgattcgttgcccggataagcgaagcgccatccggcgttaacgcggttacttacctttattctgctgctcaatagacgccagcatgccgcgcaggatgttcaactcctggctttctggacgcgcgcgggtgaacagacgacgcagcttgttcatcacctgccccggatgattcgggcggataaagcccgtcgccagcagcgtctgctcaagatggtcgtagaatcgctccagatcgtccaccagcgggtacggcgcctcttcatgctcaaccgccggctgcgcttgctcctgcgccgccagccaggccatccgcacttcataggcgataacctgcaccgccatcgccaggttcagcgagctgtactccgggttggcggcgatcgccacgtgatagtggcacttctgcagttcatcgttggtcagaccaacgcgctcgcggccaaagaccagcgccaccggcgcatgctgaccttcggcgacgcttttcagaccgcattcgcgcgggtcgagcatcggccacggcagcgtgcgggagcgcgcgctggtgccaaccaccaggctacagcctgccagcgcttcatcaagggtatcgacaatctgcgcgttgccgatcacgtcgctggcgcccgcggccagggctatcgcctgcgaatcgggtttgaccagcggattgaccagccacaggttagttaagcccatggttttcatcgcgcgggctacggagcccatgttgccggtatgggaggtttctaccagtacgattcgaatattttgcagcattatggttcttcggctaaagattattcgtgcatgctaccataaaacggagacataagcagatttggctgctattatatgcgccgttttttcccgttctttaacatccagtgagagagaccgatgcatccgatgctgaacatcgccgtgcgcgccgcgcgcaaggcgggtaatttaattgccaaacactacgaaacgccagacaccgtagaaaccagccagaaaggcagcaatgattttgtgaccaacgtcgataaagccgccgaagcgattattatcgaaaccattcgcaaatcttacccgcagcacaccattatcaccgaagaaagcggtgaacacgctggcgaagagcaggatgttcaatgggttatcgatccactggatggcaccaccaacttcgttaaacgtctgccgcacttctctgtttccatcgccgtacgcatcaaagggcgtactgaagtcgcggtggtctacgatccgatgcgtaacgaactgtttaccgcgacccgcggccagggcgcgcagctgaacggctaccgtctgcgcggcagcaacgctcgcgacctcgacggcaccattatcgcgaccggcttcccgttcaaagcgaagcagcacgccaccacctacatgaatattctcggcaacatgtttaccgaatgtgccgacttccgtcgcaccggctctgccgcgctggatctggcctatgtggccgccggccgcgttgacggttactttgagatcgccctgaaaccatgggatttcgccgcaggcgagctgatcgcccgtgaagctggcgcgattgtctgcgacttcaccggcggtcataactatatgctgacgggcaacatcgttgccggtaacccgcgcgtggtgaaagcgatgctggcgaacatgcgcgagcagctgagcgacgcgctgaagcgttaatctcttactgatgtcaaaaaggaagccgcggcttcctttttttatgtcattttatcatgttgaggatctggcgaatcaccgcattgccgccaatacagagcaccgtcaggccgctaaataaggccagcggtccgcgccagcgcagacagccctgcgtccccagccagcgccggaaacacagcgctatccctaccgtcgccaggcgggctaacagcacgccgaccatcgccggaaccagcagcagccatccccacagaggcagctcatactgctgcgcactgagtaaaatccataccagctgaaacggcagataaaagctcagggcaaagatcagcggaatgcgaatattgcctgccggtgcggcaacgccctgaaagtcgcgccagccgtcgcgcagcagtattccagccagcaccagcgtggccagatagcatacgtcgttaaagatgcccacgatctgcattagcctgtcgctgcttagcttacccataaacgcgaaacgccagaaaatgatcaccagaaaaccgaactgcaacacccagctgcgcaggatccagtcgaccatctcccgcggcgagggctggttatgcacagcccaggcaacaatgggcagtttactgtgaccgggatggcaaaaggccagcacgaagcccgacagcgttagggtggcgtaggccaccagcggaatatccgcgacactcgccaccccgaatcgcataacatacggcatagcgtggtagacacgcaccagatctgacggccaccagctggccagggctggaaaccagaatacgagcgccaggcccgccagcagcccggcggcgccggcgcagccataatagaaccgcccgctctgcgcgggagaaacgatatttgcggccatagcgactccttgtcatccgccgaaaagcggaaaactagagcatcgcttcgccagcggcaagcgctggcgcccactttaggatttgcgcccggcgtctgtctaaaacggacggatcccaccgccggcagggacggcgctgagccacatcacccctgccgccgccagcaatatgacgccgccggccagcgccagcgtcgcccaactaacctgcttccataacgctggcgcctgatggcgactgaggcggatcgccagttggcggaacccatgcaccaacagcgccagcgccgtgatagtcaacgaggttcccgccgccatcgccagcgccgccgccatcccccagccaaaaacgccgattaccttgctgaacagcagaaccatgatcgcccccgagcagggacgcatgcccatcgacaggacaatcgcggcgcgagcccgccagtcgtcgccggcctgcagctgctccggggccgggagatgctgatgcccgcagccgcagtgttcgttatgaacatgatgcggggtaaaagcggtaaacgttggccggcgcagcagcagacgcagcttttttaacgcccgccagcacagcagcagccctaacgcacccaccagcaaatagcttcccttctccagccagaaactgctgaggtgcagctggcgcgccggcagctgcagcagcgccagcaccacgaccaccagcgcgatggccaccagcccctgtaataaagaggcggccagcgtcaggccaatgcttgatttcagcttcgcgggatgggtggcaagccaggtcgtaatgacaattttaccgtgtccgggccctaaggcatggagcaccccgtaaaccaagctaacccccagcagcgacagccctgccgccgccgggttctccgccaccgcctgcagcaggcggctgagttccagattgagcgaacgctgccagactgcgctctgcatcagcacctgcggccacgcccgccacagccaaatgccgccgatgatgctcacagccagcaacagcgccagcggccacagcgctttccagcgcgaagatcgcgcgcgcggagtaaaaattactgacatgtcagggtcaccttctgggcaaaatagctgcccagcgccatatcctccggcggcgcatccgctttatccagcgactgggcgtatgagagcattttgtcgttcggttttggcgtcatcaccgttgccttacaggcggcccgcaaccctgcgggcagggaaaaatcgctatccttgtcataaaacatatcgacgtagtaggtcgggtcgaaggtggaaaaggtaaacgtctgcccggcaatgggttgcggcgtcgccagcggcagagtaaaggtgagtaccgcctgcagtccgtcacgttcgaggccgtaaccgtcgggacgattgtcaaatttaacccgctgaccgttatgccacagctcgctgaaatagtgctgaccgagcacgttggccatcacctccgccgccagctttttccagacttcgctgcccggtttggcgtttccggcatcatagagcagatccgatgaggtaatttcatccatcgtccagcgcattttaaaggcgctcagcagaccgtccttgaccaccggctcgctttgcaggctgatgaagctatgcggatgcgcagcggccgaccatgataaaaccatgcaaaacgccgcgcttgtgcattgtttcactctgttcatctgttcctcacgtgaaaaattctgtgaacttcgccagcaatcctgagtaaaagcggacgctcttccctgcccacgccgcggtcattgtctatccttagcggaaaccctaactggaacttaccagatgatgaccgtcattgaaccaccatctgcgctttccagtccacagcgccgtagccaggtgctcctgatgttttatctgcccggacagtcggtgacgactgaacggcttggcaggatcaacctcgttgatgagaccacggtccggcaggatattgaggagaccggacgcgaaattcagcgttaccaccgtttgaccctccagtcacaggtggacggcagctatcggattgaaggcgccgcgctcgaccaacgtttatgtctgctgcatgcgctgcggcgggggctgcgcctctgcccacagttcgttaatcatcattttacctcggcgctgaaaacgcagcttaaacaggaaggcattgcccgcaccttatacgatgataccaatctgcaggcgctggtgaaccgctgcgcgcgggcgctcaatcgccagtttgactgccgcgacgtgcagtttctgcgcttgtacctgcagtactgtctgctcgaacatcaccggggatactctccggacttcaatgaggaacagcaacgctgggctcaaaccgccgccgagttcaccctggcgcaggagattgtccgccactggcagcgtcgggtcggcgctccgccccatgtcggagaaccttttttcctctcgctgctgtttatgttgctcaaaacccccgacccggtccgcgacggtcacccgcacgatcgccgcctgcggctggctatctccggcctgatccaccgctttcagatcctcgctggcagagcgttcagtgatgagcaggggctcagcgatcaactctatattcatttgtcgcaggcgttgatccgcagcgtgtttgctatcggcatcgacagcacgctcacagaggaagtgacccggctctaccctcgcttactgcgtaccacccaggcggcattgagcgaattcgaggaggcctggcacatccgttttaatgaggaagagaccggtttaatcgcggtgatctttggcgcctggctgatgcagaaaagcgacctgcacgagaaacaggtgctgttgctaaccgatgacaacccagctattgaagaggccctggaacaacagctgcgcgaactaacgctgctgccgctgaatatcaaataccagagcgtagagcgctttcagaaggaaggtgcgcccaaaggggtgacgcttatcgtcaccccctatgcgacggcgctgccgctgttttcgccgccgctgatccacgcggagaactacttcactgaacgccagcagcagcatatctgcgccatgctcgaggactaggccgccaccgcttttggccgtatagccatcgccgggagcgtcagcagggccatcacccagaatacgccctggtgcaggtgctgatagaggaaaccggcgaagacggtcatgatggcaatactgccgcccatcgccaccgcggagtagacggcctgcagacggatcacttcgctaccctgacgggcggcgatatagcgcatcgccgccagatgacacaccgtgaaggtgccacagtgaaggatctgcgcaaggatgagtcccggcagcgccgtggtccagcccatcagtccccagcgaatcagcccgcagacggcggagagcaaaagcaggtcgcgggcgctgaagcggcggaacacctttttactcaacgcgaagatcaccacttccgccaccacgcctaacgaccacagataaccgaccgccgaggcggaatagccggcctgctgccagtagatggcgctaaagccatagtaggcggcatgcgctccctgcagcagacaaacgcaggcgagaaagcgccagctttggcgcaccagcgtcagccaggccgccattccggccccctgctgctggcgcgactccccctggggcatcaccgacggcttaagcagcatgccgagcagcatcgaggcgacccccaggcttagcatcagcaggatcgcccggtaatcgaacaggctcaccagcttgccggtcagcgccgaaccaatcacaaaggcaatagagccccatagccgcacccggccatagtccatggtgatctgcttttgccaggtgttggccagagcatccgtcagcggcaccagcggcgaaaagaacaggttgaagccgatgatgatcgccagcagccatgctacgtggctgccggcccagaaggccagcgcgaagagcaaggttaacagcgccagcacgcgcagcgcggcgatcagccgggagggatcgctcacccgcggggcaatcagcagactgccgagaaaacgggccaccagaccggcgccaagcaaaatgccgatggtttccggagtcagcccgtttccggccagccagacgctccagaagggcagaaaaataccgtagctaaaaaagtaggtgaaataactgagcgccagccagcgcgtggagtgcaagaccatgatttcctcccgaatggtggcgatagtctggcgataaaccccggcgggcgcaagatgctcttgtctgctgatagctcgttatttatgccccctcgatgatgattttcagcgaaaaattcagcttctctcccgcgcctaaaactcgcagccccggctgcccgtccatgttgtgggcgtttaccggatggctttgcggctcgaggcaaaggaatgattcaccttgcattctgaacagcatcaaccacggagtttgcgatagaattgtgatattcatcacgtcattgcttaccctcgcccgcccgccccagccggaataacccacgttcagccaacgatcttcaccgaactgagccacgctgaaattggcatagtcgggcaagtttccttgccagttgagaggtaagtgattttccccttccggccagtaaccgctgacctggaactgaaccttgctgcgttcatcgaaagggaaaaagggatgaaagccgcagccgtaaagcgcagggacctccccatagtgggtaagcgttagctccgctatcagctggttacgcagcaactggtagcggagctgcgccagataatcgaaaccgcaggcatgctgccgacgcagctgtaatacacaatactcggcgccgtactcaataatatcccagcgctgtaaccagccgtcaccgtgaagaaagaaatactcgtcggcatggtggcgaggcaggacaatctcctgcccatgaaaaataaaacggttgccggcgacgcgattggccaatggcagcatcggaaacatgccgccggcgggattttcatatagcaccggcgcttgatattgccgcgagaataaactttgcactttgccgcccagagaagagacgcacatccgcagatgcgcgttctccagaatccactcttccgccattagcgcatctgctcctgcttcgccgcattcacgcccgtatgacgctgcgccagctgctcttccagcgcttcgagggtgatacctttcgtttccgggacgttgcgcaggatatagaggtagccggcagcgcaaatgacaccatacagcaggaagcttcctgccgcgcccagaccggcattaagcagcgggaaagtataggttaacaggaaacaggcgatccacagcgccagggtacctaaagacatcgcgagtccacgtacgcggttgggaaaaatctccgccagcagcacccaggtcaccggcgccagggtcaacgcataaatagcaatcgccgccagcaccagcaacagtaccggccaccccataatgcccatggcgtaagcgccggcgatcagcacatagatcagcgtcaatcccgaagcgccaagcagcattaatttacggcgaccgattttatccaccagcggcagcgccgcaatggtaaagaccagattaacgacgcccgtcgcgacgatagatttcagcgtgctgttaatatcgaaccccgccgaggcaaaaatctcctgcgcgtagttaaagatgacgttaatcccacaccactgctggaatatggcgagcaccatgccaatgatcacaatcggtttcacctggggagccaacagcgcgccgtaggagactttattgttatccttttccagggtatgcgcgatttcacgcaggatcctgtcggcatagtcggcagaaccaatgcgttccagcgcagcccgggcgcgctccggtttaccggccttcatgagccagcgcggcgactcggggacaaaaaacatcaggaccagaaacgccagcgccggcaccagttccgcaccgaacatccagcgccagcccatctgcccattccagctgtccacaatcatctgctgcgtcgcccccggctccaccggttcagcaatcatcagattgattaactgagcggccagtacgccaatcacgatggtgagctgattgaccgcgacaaaacgccctcttttctctgccggactgacttcggcaatgtaaagcgggctgagagcggaagccagaccaatccctacgccgcccacaatgcggtaaaccacaaacatatcgaaatgactggcgaccgccgtcccccaggccgacgcgctgaacagcacggcggaaagaattaatggcagcttgcgccccagtttgtctgcgcaccatcccgaaattaatgcgccgaaaatacagcccaacagcgctgagctcatcgcccagccggactgcgccgggtccgtaattgaaaaccaggcttcataaaatggcttagcgccgccaatcaccacccagtcatagccaaacagtaaaccaccgcaggcggcgaccagacaaatcgtccagacgtagcccattttcagatgtgtctgcgcgttgttcataatgattcctctataagggaaacgcagggaacagtagggttcaggcgggccgagcccgcccattgaggttcaggaaaaaatgccgctttgcagggcatggcgaatcagatgcgccttatcatgagccggatttatttgcagaagctgctgcatcctctgctggcaggcggatacgttgcccagccccagatggcccagcgcttcaataaacaagcagtgctgcagatgtctctgctgcgctgatacatcgagaaccaccaggtccggaagagagacggcaaaaaaatcgacttgcggaacgtcatcccgatgctgcgcggcccagtcgataaaatggcggaagtgctgctcggcctgcgctgggttaccgctcttacgcagcgcaatgccctgccagaaaaggtaatcggcgggttgatcgttgtagtaccgcccggcgtccagcgttgagcccccttgccgggcaagctggtaatattccgccgcctgctgcgcatccccagcctgttctgcgcagtagcccagcaaataccagatatcgttgtccgtttgcccaggcagccgcccctcccccagattgtcgggatagcgtaatgcggctttcagacagtccgtggcctgtttaaacgccccacgctcgatgaactgtaatgccagatggagctgattgagcaaatactggccggtgattttcccttctcctccttcccagggatggaatacgcgcgtatccagaatcgcggcggcatcggcataatgaccggacgcgttccacaggcttagcagctcagcggtcaggtcgtcccgcttcagcaccacggctttacgttccaccagcgtcgtcagtcgctcatgtaccggcctggccagtaatttttgcaaaaaatcgagttcaaacaggaagcgcgcattgtccggctccagcgctacggcgcgctgcagataagccagcgcctgcgttgcatcctgctgtttattccacgagtaaacgcccagcagacgatgagcgggcgcataatcgggagatttttcgagcgtctcgcgccagcagctcaccgcctcgtcatagcgacgtttgctgtaccagaagcaaccgagtagatagcgggcaaaagcgctgtcgcccagcgactgcagcatctgaacttcatcgagtgagttagggaaacgaacattgtgcgcatggcagtgctcggcggcggcaataaactgttggcgttcattggcatcatcacttagcgacgcacgccagagcatcggcagcgcttcctgactgtccagaaccgcaagaacctctttcaccgccgacgtctgtccgatagagagcaaccaacccgccagcaggctggcgttgacccctctgcgccccgtgatgcgcagcagggcttctcgcgcgtcgtcgctccgctcaatcatccagcgcgcgcagtgcagcggatagctcaatgggtattgctcaagagaggcgaaaataaactccagcgctgctttcttctgcccactgttggctaatgccagcgctttcaaccccatcgccagaggattgctggcgttgaaccgcagactggtgtttactttttccagcgcatcggcaacatcaccgcgcttcatcgccagcctcgccagcgaccaccaggcggcgtcacggcagttaccgctccaggaggctttgtaatagtgatcccaggcgcctgcatcatcccccatcctttccagcacgctggcaagcagcatactggcttcgccatctcgcgggttcttattcaaacgatgcgcgcgctgtagcgcagcacgggcacactgttccgccagcgcccagtcggcactgttgaacgccagggtaccgagggcaacattattgcgataatcctgcggatcgagctcaaccgcccgacgatagtaatccccggcgtagcggcttgcgtggttgtattgttcaaggtgctggccgataaaatagagctcgtcgccattgtggatcgcttccggtaacgcgggcgctatagctggttcgggcagcggcgtctgttgggtaatatgttcctgataatccagcagcggctggttctcggcggttttcactttgagggttaagcgcccgacgccattttccggcagcgtctgctgccagctctcaccgggcttcagcgtcagctgagtttcgtacaatggctgatggtcagcgctgagttcaaccacgatatgatttagcggagcaatggcatatacgccaagctgcagttgcccagactcgcgaaccagcttcagtgccagctgtgtattggcattttgcaccatccctaactcgctgtagggaaggaaattttgcacaaacaccttctcttcataaggcgcaagccacgtaaagtcaggctggttatcggtgaagacgccggtcatcagctcaatataagggccattttcatcagtcagatttcgatcccaggcctggccaaaatccccgtacccccagctccactgtttcttgccaggagagacatggtgatcggcaacatgcagtaacccgcctcgctcgtcatgatgataagcgccgacaaaatcgtaatccgacttctccgccatatacgaagtgggtaccgggacgtttttataacgggagatatcaacccccgcagaatagtccactttgtagtaggtaccggtggcaatcgggaaagcggaaacatcacgcttaccatggtcgaatacagcggtgacatcgggtgggaatacactctggtgggcatcgccgccttttactgcagggttggcccaccacaggaaatggcgcggcgtggcgttaccattgaagatcttgccagtgatttcaatcagcgcgcggtcaggatagagcgtaaacccggccataacctgcaaaccgcgcatgggctccgcttcccccatccatacggtctgcgcgccgttttctccctgctgaatagaaaaatcgaccggcttaaaggtcgtcggccggtgatgttgcggccagttaaattcgattccgccggagatccagggcccgagcagccctaccagggctggcttaaccacctcattgtaatagacgaaatcacgttgtttgactttatcatatgcccggtgaatacggccgccaagctccggtagcagcatgacccgaaggaaatcattctccatccacactgcctgataatcgcgcatttcgcgttcgccggtcagggtatcaatcacgccgtagggatagacgctgccggaagatccttgataaacacgtttttccagaaacatagggttcggatcttccgctcccgtcgtccacgttggtaatgaaatgatttcctgccagaccttaaccgaaccgtacatgatgcctccactaaacaaaacgaagtaaaagttgcaataacaggagtctatatcgccaattcgctgttaaaatgcgcaatgctcacgcaatatagttaagggagttaagtgtatgcagcgtactggctttaataacgcccgggtccggcaggccaataagtcgatttttctttcccatctgtggcgggaaaagcagctcagtaaatcacagctctctcaactcaccggtctctccattccggcggtgagcaatattctggccgagctgcttagcgagggattgatcggtcactcaacggaacacttgagcaaacggggcgtgaacagcggcagctaccagatccccgagcacggcgcctggacactgtgcatgaatatcaccccgaccagcattgaatatcagcttgccgacgcccgcctgctggcagtggatggtcatcagcatttgccggtcaacgcgcccactcctcaggccctgcttgaggccattgttgaatgctggcggcatatccaccgccgctacccgcagcacagcatcaatctcgcccttggcgtgcatggacaggttgatccgattaccggcgtttcacaaaccatgccccaggcacgctggaaaacaccgatcgaaataaagtatctgcttgaggagcggcttggcgtgcaggttcgggtggataacgactgcgtgatgctggcgctggcggagaagtggcagcatcagggtacacagcaggatttttgcgtgatcaacgtcgactacggtatcggctcgtcatttgtgattaacgatcatatttatcgcggcagtctgtacggcagcgggcagattgggcatacgattgtcaatcctgacggcaaagcctgcgactgcggaagatacggttgcctcgaaaccgtcgcctctctcagcgcgctgaaaaaacaggcccgaatgtggctcaaaacgcagcctgaagcaacgctctcccctgagcagttaaccacggcgtcgctcattgaggcctggaaagagggagatgtgcaaattcgcgcatgggttgataacgctgccaacgcgattggcttaagcctctataatttcctgaatatattaaatattaatcaaatatggctttacgggcgcagctgcgccttcggtgagcagtggctggaaagtatcgtcaaacaaacgggtttcaacccctttgaccaccgggatacgccgcgagcgcacgccacccaaattggctttggccagctgacacgcgcccagcagctgatggggataggttatctgtacgttgaggagcaattgcagacgctggtttagtcataaacgaacgtggcggagcgcaaatttgtgtattacgtttaaatcacacgtctctcataacgagctgattatgaacacactccgctattttgattttggcgcttcccgctctctattgctgcttatcgcccgcatcgccgtggtgattctgtttattctttttggctaccccaaactgctgggctttgacggtacggtgcagtacatggccgcctccggcgcgccgatgccgaccctggcggcgattatcgccgtcattatggaagtgcctgccgcgattctgattgtgctcggctttttcacccgcccgctggcggtcatctttattttctacaccctgggcacggcggtgattggccatcactactgggatatgactggcgatgcggtattgccgaacatgattaacttctggaaaaacgtcagcatcgccggcgctttcctgctgctggcggtaaccggccccggggcgatctccctcgaccgccgctaatctccagacgcaaaaaaggccgcatacgcggcctttttgatgtcaacgctaacgcttacgcatataccgggaagcgggcgcagatatccagcactttacctttcacgcgctcaatgaccgcgtcgtcattgatattgtccagcacgtcacacatccagccagccagctctttgacttccgcttctttaaagccgcggcgagtcactgccggagaaccgatacggataccggaggttacgaacgggctcttcggatcgttcggcacgctgtttttgttgacggtgatgttggcgcggcccagggcagcgtcagcttctttaccggtcaggtttttatccaccaggtccagcaggaacaggtggttctcagtaccgccagacaccactttgtagccgcggttcaggaacacttccaccatcgctttagcgtttttcgcaacctgctgctggtaaactttaaactctggctccatcgcttctttcagcgccaccgctttcgccgcgataacgtgcatcagcgggccgccctgcgcgcttgggaacactgcagagttcagttttttgtacagctcttcgctaccgcctttcgccagaatcaggccgccgcgcggacccgccagggttttgtgggtggtggtggtcacaacgtgagcatgcggaaccgggttcgggtacacgccagcggcaatcaggcctgccacgtgcgccatatcgacgaacaggtaagcgccgatgctgtcagcgatttcacgcattttcgcccagtcaacgataccggagtaagcggagaaaccaccgatgatcatcttcggtttgtgttcctgagcctgcttcgccatgtcgtcgtagtcaattttaccggactcatcaataccgtaagggatgatgttgtacagtttgccggagaagttaaccggggagccgtgagtcaggtggccgccctgcgccaggttcataccgagcacggtgtcgcccggctgcagcagcgcggtgtagacggcaaagttagcctgggagccggagtgcggctggacgttagcatagtcagcgccgaacagttctttcgcgcggtcgattgccagctgttcaaccacgtcgacgtattcacagccgccgtagtaacgcttgcccggatacccttcagcatatttgttggtcagctgagagccctgcgcctgcataacgcgcggactggtgtagttttcggaggcgatcagttcgatgtgctcttcctgacgtactttttcctgctccatagcctgccacagttcggcatcataatcggcaatgttcatttcacgctttaacatccgcatctcctgactcagctaacaataaaatttcggcctaaaaaggcggtccgattggacaacggcccacagtataaccgaatcattctgtgataacaggtcttgacaaaggattttacgcaaacgattggctccgcatgacacaaggctttgagcaataacgcctctctcagtatcaacggatttcttttcaggtttgtgatgcaaattcttcatgttgtaactggatcgggggaatgtgttaaagaaccatttacaacgcagggttatttctttaagatgcatttaaaatgcatcattaagataacacataaggaagcacgctatgcttgacgctcaaaccatcgccacggtaaaagccaccattcccctgctggtagagaccggcccgaaattaaccgcccatttctacgatcgtatgttcgcgcataatccggagctcaaagagatcttcaacatgagcaaccagcgcaacggcgatcagcgtgaagcgttattcaacgctattgccgcctacgccagcaatatcgataacctgcctgccctgctgccggcggtggaaaagatcgcccagaaacacaccagcttccagatcaaaccggagcagtacaatattgttggcagccatctgctggcgaccctcgatgaaatgttcagtccgggccaggaagtgctcgatgcctggggtaaagcctacggcgtgctggcgaacgtctttatcggccgtgaagccgagatctatcagcaaaacgccagtaaaaccggcggctgggaagggacccgcgcgtttcgcatcgtgaagaaaaccccgcgcagccagcttatcaccagctttgagctcgaaccggttgatggccagccggtcgccgattaccagcctggccagtacctggccatctggctgaaaccggaaggcttcgaatatcaggaaatccgccagtattccctgacccgcaaagcggacggcaaaggctaccgcattgcggttaaacgcgaggaaggcggtcaggtttccagctggctgcataaccatgccagcgaaggcgatgtggtctatctggccgccccggcgggagatttcttccttaacgttaagccgcagacgccagtcaccctgctctccggcggcgtcgggcaaacgccgatgctggcgatgctggatgcgctggcgaagagcggtcatcagggtcaggtgaactggttccatgcggcggaaaatggcgacgttcacgcctttgccgatgaagtgaaggcgctcggcgcggcgctgccggcgtttacctctcacgtctggtatcgcaccccgactgaggccgaccgtcaggctggacgttttgatagcgaaggtttgatggatttagcagcagtggcggacaatattcgcgacccgcagatgcagtattatctctgcggcccggtagcgtttatgcagtttgcagcgaagcagctggtcgaattaggggtcaacaaagacaacattcattacgaatgcttcggcccgcataaggtgctgtaagccccgacgacgcggggatctgtaggccgggtaagcgcagcgccacccggcaatactgcagcgagcggcgagcgttaaatcgccgcgtcgtcttcttcgccggtacgaatacgaatgacccgcgccacgtcgaagacaaagattttaccgtcgccgattttaccggtctgtgcggtacggatgatggtatccacacaggtatcgacgatatcgtcggtcaccacaatttcaatttttactttcggcagaaaatcgaccatatactcggcaccacggtacagttcggtgtgccctttctggcggccaaagcctttcacttccgttaccgtcatcccggtgatgccgacttcggccagcgcttcacgcacgtcatccagtttgaaaggtttaataatcgcatcaatctttttcatggggttcctgtcttaatcgcgtaaccggttgcttaccgtatcataacttgcgctatagtgcggagctactctttaaagtcgttggcgtcgagctcatggcgcgacagcagcttatagaattcggtgcggttgcgccctgccatccgcgcggcgtgagtgacgttgcccttggtaatttgcagcagcttgcgcaggtagttcagctcaaactgattgcgcgcctccacgaaggtcggcagcgccgtgttctcgccctccagcgcttgctcaaccagcgcgtcgccgatcactggcgacgaagtcagggccacgcactgctcgatcacgttcaccagctggcgcacgttgcccggccatttggcggccatcagccgcttcattgcatcgctggaaaacgcccgcacgaacggcttatggcgatcggcggactgacgcagcagatggttggccaacagcgggatgtcttccgtacgttcggagagcggcggtattttcaggttcactacgttgaggcggtagaacaggtcttcacgaaactcgccgcgggccatcgccttcggcaggtcgcggtgggtggcggagataatccgcacgttgatttcgatatcgcggttgctgcccagcgggcgcaccttgcgctcctgcaggacgcgcagcagcttcacctgcaacgcaaccggcatatcaccgatctcgtcgagaaacagcgtaccaccctcagcggcctggaataatccttcacggttactgaccgcgccggtaaaagcgccccgcgcatggccaaacagttcggattcgagcagctgttccggcagcgcgccgcagttgatcgccacgaacggcttatcatgacgcgggctggcgttgtggatcgcctgggcgacgatctccttcccggtcccgctctggccattaatcagtacgctgacatccgattgcgccaccatcccggcctgctcaagcaggcgcagcatcagcgggctgcgggttacaatcgcctggcgccaggcttcgtcggtggccggcgagcgctgctccagcgcctcatcaatggctttatataaggcatctttatcgaccggcttggtcaggaagctgaacaccccctgctgggtagccgccacggcgtcgggaatcgaaccgtgagcggtgagaatgatcaccggcatgccggggtggcccttctggatctcgctaaacagctgcaggccgtccatttcatccatccgcagatcgctaatcaccagatccactttctcacgccccagcacgcgcagcgcttccggcccgctctcggcggtgaccacgctgtagccttcgctgaccaggcgcatgcccagtagcttcaacagtcccggatcgtcatccaccagcagtaaacgcgccggtttacggatcgtcatggatcacctccggcactttttcgctgccgaaattgccgcccggcttgcggctggagagctggcgttcgatatccgtcaggttctccagcttgcgggtggtcagctccagctgctcgcgcagcgccagctcctgctgacgcagtgtctccagttcgctatcgctggactgctgaagcttcgcgtaacgggcacgctcttccaccagctgcagctgacgggtctggccgtcgcgccagagctgatacagcgggcggacctgaacggcgatttgcgggctgaaggtatcgagacgcgccaccaggtcgcggcgctcctcaggggtaattttagcatcagcaagcaggatgccgcgacggaacgcgtcctgccagctgtcgtcggtatggcgtttcgcctccgcccgcgcctgcgccggcgcgaggcgatcggcacagtcaatgccccgcagccagtagaggggatttttgtcgctggcatcgctgctgtgcgcccagatatccgcgcagtctaccgcgacaaaatcggccacctgatgctgcgcctgcccgggggcggcggtaccttccgcggtatgcggtgaaaagccggcggaacaccccgccagcgtcagacaagcaatgcctgaaagcagccatccgctgagggaacggcgccaggccaggaattgggacatagttccccgatatcgattcataagttggattattccggcgctgagggaagcgtaatgcgaaaacagacctgcccggcgggcgcatcaactaagctgagctccccttgcatctgccggacgcagtcgcgggcgatactcaaccccagtccactgcccttaacggcccctttacgctggtgactcccctggtaaaaaggctcgaatatcatgtttttttccgcggccgggatcggttcgccgctgttggcgacatcaatacgcacctgatctccgtgccggtagctatggatacggatgttaccggattcagcaccatagtgcaccgcattggagtagagattatccattacgcttatcaatagcgcaggctctgccaggcaacgccgcgcctgcagcgtcagttcggtatgcatcagtttagcccgcgcgggcaggctgtgcgccgccacgacgttttccaccagttccaccaggtccaccgcttcgcgagccaccgggccgtcggcctgttttcggttatagtccagcagctgttcaatcagcttttgcaggttacggctactgctgtcgaggatctcgacaatctcctgctgctcaggggtcaggggccccgcgacccggtcggccaacagctcggtaccttcacgcatactggccaacggggttttcagctcatgcgacagatggcgaagaaattgatgccgctgcgactccagccacgccaggcgctcgctgagccagatgatgcgcttgcccaccgatcgcagctcgcgcgggccggtaaacaatgcggcgtcgtccagcgactttcctgcccccagctgattgatcattctttcgatgcctttcaccgggccgataatcatgcgggtgaagagtagcaccagcgccaggctcagcagaaacagcaccagcgcctgccagccgaaaaactggccgcgttcggctatctcctgctgcagctgttggccacgagaatagacgaccgcccgggtcgcctgcaccatatcgctgttattactggcgaaaacttccagtctggcggctgcctgggcatcgggtccgctatttttacactgcagctgcgccagatcgctgacatcctgacgcagcgcctgccagagcttctcgtccggcagcacgccggcgtgggcgtccagcatctggctgtagcgctgccgctggttttgatagacgcgcgccagcgtcggatcgtccagcacgcagtactggcgatagctgcgctccatctccagtgcggcattgatcatcgcctcgctgcgtcgggcgtcgaccagggtggtacggttaatatgcgccgcctgggcgctaagggcgttcaggctctgccaggcctgccaggccagcaccagcaatggcagcaggatcagcacaaaagagagcgtcaccagctgacgcagcgaacgggggaaaagagagagtcgcttcaaggatgttgtctcaatcattagctctggtcgatgctaactgaggagcgcgccggagaaaagcgctaccgctggttactgcgccgcagaaacaacaaagccaggcgcaaggcctggctttgttcaggaatgaggcggtgccttactcgacgtttcgcccgatgtctgataaagccaggctgttatcaggagttggacggcaggcacctgtttgtgcgtcattcgaagtttatgtagcgcgtcccgaaggggctgacataagaaggtgaatgagccactggttaatattatgcatgaactatgccagctctcaaaacattttattaacatactgatatatatgacattaaccgcaagaacagtcgaactacctctgtttatttttcacccgcgttgtcgctatttagcgacaccaaataggctaccgattactcatcatttaaatcaataacttaagtgtcgcctattgacgacactgcaatatcgcagttgtcggcaattcccgacaccctggcgtgccgaccatcacagataaaaaaaagccccctgtcaggcagggggctgatacgttcgcgtgaagcgcggcgggaagattaacccagctgtttacgcgcgttacggaagatacgcatccacgggctatcctcgccccagttctccgggtgccaggagttgcttacggtgcggaagacgcgttccgggtgcggcatcatgatggtcgcgcgcccgctttcgctggtcaccgcggtgataccgttcggggaaccgttcgggttcgccggataggtttcggtcactttgccgaagttatccacgaagcgcagcgccaccagacctttgctctccagctgagccagatgcgcgctgtcgcgcacttccacctgaccttcgccgtgggagaccgcaatcggcatccgtgagccaaccatgccttccagcagcagggatgggctttgcgtcacttccaccaggctaaagcgcgcttcaaagcggtcagactggttgcgcacaaagcgcggccacaggtcgctgcccgggatcagctcgcgcaggttggacatcatctgacagccgttgcacacgccgagcgccagcgtctgcggacgatggaagaaggtcgcgaactcatcgcgcacgcgctcgttgaacagaatcgacttcgcccagccctcgcccgcgcccaacacgtcgccgtaggagaagccgccgcaggctaccagagcatggaaatcgcccagaccggtccggccggccagcaggtcgctcatatgcacgtcgatggcgtcaaagccggcgcgatggaaggcggccgccatttcaacgtgggagttcaccccctgctcgcgcaggacggccactttcggccgcgcgccggtggcaatgtacggggcggcgacgtcgtcgttaatatcaaacgagagcttcacattgaggcccgggtcggcatcattggctttcgcctcatgctcctgatcggcgcaggccgggttgtcgcgcagacgctgcatctgccaggtggtttccgcccaccacatgcgcagcgtggtgcggctttcgctgaacaccgtctgaccgccggcggtcagcacgaagcgatcgccctcaaccgctttaccgaggtaatgcacgcagtccgccaggccgttaaccgccagaatggcttccaccgcctcacggtctgcggcgcggacctgaatcaccgcccccagctcttcgttgaacagcgcggccagatggtcgtcgcccagcgcggcgatatccgcttccacgccgcagtggccggtaaaggccatttccgccagcgtgacaagcagaccgccgtcggagcggtcgtggtaggccagcagtttacgctgcgccaccagggcctgcatcgcattccagaagcctttcagttgcgcgacatcgcgcacgtcagccggcttgtcgccgagctggcgatagacctgcgccagcgccgtcgcgcccagcgcgttgtgccctttaccgaggtcgatcagcagcagggcgttatcttccgtcgaaagctgcggcgtgacggtatgacggacatcttcgacacgggcgaaggcagagatgaccagcgacagcggagaggtcatctcgcgctgctcgctgccttcctgccagcgggttttcatcgacatcgagtctttaccgaccggaatggtcaggcccagcgccgggcacagctcttcgcctaccgctttcaccgcctcatacaggccagcgtcttcacccgggtggccggcggcggccatccagttagccgacagcttcacgcggttcagctcgccaatctgcgtggcggcgatgttggtcagcgcttcgccgaccgccagacggccagaggccgcgaagtccagcagggcgaccggggcgcgctcgcccatcgccatcgcttcgccatagtagctgtcgaggctggcggtggtcaccgcgcagttggccaccgggatctgccacgggccaaccatctggtcgcgggcgaccataccggtcacggtgcggtcgccgatggtgacgaggaaggttttctcggccaccgtcggcagatgcagaacgcggttaaccgcatcggcaagggtaatcggttggcgatccagcgcgctaccctgagctttcagagtctgcacgtcgcgggtcattttcggcgttttgccgagcaggacgtccagcggcaggtcgatcggctgatcgttaaagtggctgtcgctcaggctcagatgctgctcagcggtggcttcgccgataacggcataaggcgcgcgctcgcggcggcacagttcgtcgaacagcggcagctgctccggggcgaccgccagaacataacgttcctgcgattcgttacaccagatctccagcggactcatccctggctcatcgctgagaatatcgcgcagctggaatttaccgccgcggccgccgtcgctcaccagctccggcatggcgttggagagaccgccggcgccaacgtcgtggataaagaggatcgggttggcgtcgcccaactgccagcagcggtcgatcacttcctgacagcggcgctccatttccgggttgtcacgctgtacggaggcgaaatcgagatcggcatcagactggccggaggccatagaagacgccgcgccgccgccgaggccgatgttcatcgccgggccgcccagcacgatcagcttcgcgccgacggtaatctcgcccttctgcacgtgctcaccgcggatgttgccgataccgccggccagcatgatcggtttgtggtagccacgcagctcttcgccattgtggctggtgactttctcttcataggtgcggaagtagccgttcagcgccggacgaccaaattcgttgttaaacgccgcgccgcccaacgggccttcggtcatgatgtccagggcggtgacaatacgatccggtttaccgaaatcttcttcccacggctgttcgaagcccgggatacgcaggttggaaaccgagaagcccaccaggcccgctttcggcttcgcgccgcggccggtggcgccttcatcacggatttcgccgccggagccggttgccgcgcccggccatggagagatggccgtcgggtggttatgggtttccaccttcatcagaatgtgcgccggctcctgatggaagtcgtagcgtccggtctgatggtcggcgaaatagcgcccgacttcagacccttccatcaccgcggcattatctttataggccgacagcacgtagtccggcgttttttcaaaggtgtttttgatcattttgaacagcgacttcggctgctgttcgccgtcgatgatccagtcggcgttgaaaatcttgtggcgacagtgctctgagttcgcctgggcgaacatatacagctcgatatcgttcgggttgcgtcccaggcgggtaaacgcgtcctgcaggtagtcaatttcgtcgtcggccagcgccagacccagacggaggttggcgtcaatcagcgcctgacgcccttcgcccagcaggtcgacgctggtgaccggcgtcggctgatggtgagcgaacagcttctctcccgcttccagctcgtcgaagacgctctccatcatgcggtcatgcagctccgccgccaccgcggcccactgcgcttcggtcagggttgaggcttcaacgtaatacgccacgccgcgctcaagacgcacaacctgcgccagaccgcagttgtgagcgatatcggtagctttagaagaccagggagagatggtgccagggcgaggggtcacgagcagtaatttaccggtcggggtatggctgcttaagctcgggccatactgaagcagtcgcgccaggcgctcgcgatcgtcagcgctcagcggggcattcagatcggcaaaatgaatatattcggcatatatggcgcttaccggaaggttggccgcctgaaatcgtgccagcagtttattaatacggaatgccgacagtgcaggtgaaccacgcaaaatttccatcataagtctctcgtcttcgaagctttcagggtgagccaggggggaaacgggcgtcattatagtgaatcctgcgccccgacgaaaccgtttgcgtagaaataaaatcattgatgctgtttatcaataaatgtgacgaccatcgcgaataagttgccaactggcgcattattaagcagaatgccgcacattcgacgacaaccttgcgttttttccggacatcgcctgctgaggaacctgaagctgcagaagattaactctctgaaaaaattaaagattaattatctgctgatcggcattgtcacccttttgctggcggcggccctgtggccgtcgatcccctggtctggtaaacccgagaaccgcgtggcgggcattatcgctcgcggcgagctgcgcatcagcaccatcaactcgccaatgaccttcgccaccatgaacaataaagcgttcggtctggattatgaactggcgaagcagtttgccgactaccttggcgtcacgcttaagataaccgtccggcaaaacatcagccagctgtttgacgacctcgacgacggtcaggccgatatgctggccgccggactggtctataaccaggagcgagtgaaaaactatcaggccggccccacctactattctgtttcgcaacagctggtctaccgcgtcggcaatacccggccgcgcaccctcgcggcgctgaccgccgagcagctcactatcgctccgggccacgtggcgatcaacgacctgcagaccttaaaagccgagaaatacccggatcttgcctggcgcgtggacgaaaaacgcggtaccacggcgctgatgcaggcggtgattgacggtaaacttgattacaccatcgccgactcggtggccgtcagcctgtttcagcgcgtccatccggagctggcggtggccctcgatatcaccgacgaacagccggtcacctggtttagcgcccgggacgacgataattcgctgtcggcggcaatgcttgatttcttcaacaacatcaatgaagacggcaccctggcgcgcctcgaggagaagtacctcggccacggcaacgatttcgattatgtcgatacccgcaccttcctgcgcgcggtggaaaatattcttccggaggtgcagccgctgtttgaaaaatacgcccgcgagattgactggcgcctgctggccgccatcgcctggcaggaatcccactgggatccgcaggccacctcccctaccggcgtgcgcggtatgatgatgctcacacgcaatacggcacaaagcctgggtctaaccgaccgcaccgatgcggcgcagagtatcgacggcggcatgcgctacctgcaggatatgatggataaagtgccggattcgatcccgaaagatgaacgcatttggtttgcgctggccgcttataatatgggttatgcccatatgctggacgccatggcgctcacccgcaaacagaaaggcaatcctaacagctgggcggacgttaagctgcgtttacccttgctgagccagaaaccctattacagcaaactaaaatacggctatgcccgcggccatgaggcctacgcctatgtggaaaacatccgcaaatatcagataagccttgtcggctatttgtcagagaaggagcgccagcagcagcaaacgctggccctggcggaggattacccggccgtgctccccaatgagctcgaacagccgcaggagaccaccctgccctttttcaagtttcgcgccgataagcagatggataatgcccggatgaaactccccggccacctgtattaactttccccagtctgctcccgggctttcttcagcgcttttttctcttcccgccgccagcggaagaagtcgctcagcatggcagagcaggactctgccagcacgccttcgctaatctcaacccgatggttcattcccgggtggtgcagaacatccatcagcgagccggcggcgccggtcttggcatccctggcgccaaacaccaggcgggcgatacggctgtgcaccatcgcgcccgcgcacatgacgcagggctcgagggtcacgtacagcgtggcgtcgatcaggcggtagttttgcagcaccagtccgccctggcgtaaggccataatctccgcatgggcggtggggtcgtgacggcctatcggccggttccagccctcgccaatgacctgattgttatgcaccagcaccgcgcccaccggcacctcgccctcttcccaggcgcgtttcgccagcgtcagggcatgacgcatccagtattcatcattgagttcgaggtcagacacagcggccactccagcagaaaaagcggggcgcattatacatgggcgctatcaattacacactattactccagctgctgaagctctccctgaggggttacccgccagcgatgctggcaaaagccgagcaatggattatcctgctcactatcgctatagccgctatacagccgcagcggggcgccaatctttttctccagctgtaccaccttttcatgccccaggcagcgcagggtcaatacccagccgccccagcggcgcgcggtgcggctggctatcagattcacccgcggcaaccagagggtatcgcgatagacctgctccaccagcgactgcggcgagccggtgatcaaccagacgtcggcatcggtgctggtcaggtaggcggtaagccgcgcatgaactaccggaaacgccgtcacatgatggcgaaaccagccgacaaactccgcttccagccgcttcagcaccgcctcgcggcggccaaaggttgtcgcccacagcaggaggctcatcggccagcgcgccgcccgtccgctcactgccagtccggcaaggatcaccggccccatcgccaccaccagcaacaggttcagcggcaaatggcgcagcagatagcgcagaaaactgccgaacatatcctgttggtgtaaggttccgtccagatcgaaaaacaccactctccgttcagtgtgctgcaaactgcctcctttatctcagaactcgcttctcgttagggtaagcttaacagcctgacgccatgtcgagggaaaacatcccctgccgttaagaaagaattaaagtagcaggcgaaggaaaaattgtggcttaagaatttttaattcatggtataccccttataatcgaataaaaattctgtcagtcacgagccggacggctccagcggagctccaatgaactgtttaacgcgtattcgtcagcgctatcccaccctggcggcgagcgacaaaaagttggccgattatattctgagccagcccgatgagacccggcacctcagctcgcagcagctggcagcggaagccggtgtgagtcagtccagcgtggttaaatttgcccagaagctgggattcaaaggctttccggcgctgaagctggcccttagtgaagcgctggcgagtagcccggatccgcactccgtcccggtgcataaccacattcgcggtgacgatccgctgcgtctggtcggcgagaaactcattaaagacaatgtcgccgccatgcatgcctcgctggacgtcaacactgaagagacgctacgggaagccgtcacgctgctgcgcaacgcccggcgagtgatcgtcaccgggattggcgcctccggcctggtggcgcgtaactttagctggaagctgatgaagatcggcatcaacgctgtttctgagcaggatatgcatgccctgctggcgacggtgcaggccatgtccagcgacgatcttctgctggcgatctcttactccggcgagcgccgggagatcaatatggcggccggtgaagcgctgcgcgtcggctgtaagatcctggcgatcaccgggtttagcccgaacgccctgcaacagcaggcgacccactgcctgtatactatcgccgaagaacaggcgacgcgcagcgcggccatctcctccaccagcgcgcaaatgatgctcaccgatctgctgtttatggggctggtgcagcaggatctggagcgggcgccggagcgcattcgccatagcgaagcgctggtgaaaaagctggtctgagcagaaaatgggcgtataatgcccgccctgtttgtgttgtttctgagactttcctgatggcgctgttaattaccaaaaaatgcatcaactgcgatatgtgcgagccggagtgcccgaatgaggccatttcgatgggtgagagcatttatgagattaacagcgaccgctgcaccgagtgcgtgggtcattacgacacgccaacctgccagaaagtgtgcccgatcccgaatacgatcctgaaagatccggcacacgtcgagagtgaagaacagctgtgggataaattcgtgctgatgcaccacgcggataaaatttaaccgccctcctggctagctttcgacaatcaccgtggcgcaggcgtagtggcgttcatcagcgagagtaacgtgaatagcgcttactcccatgcgttcagctaaaaggtttgcttcaccccatagccgcagcttcggcttgcccagctcgtcgttgtaaacctcgaactggttaaacgccagcccgttacggatcccggttcccagcgctttcgccgccgcttccttgaccgcaaagcgtttcgccaggaaacgcaccggctgctggtgctgctcccagatgctccattcatggtcgctcagcacccggcgggcaaggcgatcgccgctgcgggcgatcaccgcttcgatgcgggcgatctcgacgatgtcggtacccaacccgagaatggccattagccgcgcgcttccagcatcagacacttcatttccgccaccgcctctttcaggccgctcatcaccgcacggccaataatcgcgtgaccgatattcagctcatgcatttccggcagcgcagcaatcgctttcacgttgtggtaggtcagaccgtggccggcattcaccttcaggccgaggctggcggcgtaggtggccgctttggcaatacgttccagctccctggcctgctcggcgtcggttttggcatcggcatagcagccggtgtggatttcgatatagggcgcgccaacgtccgccgccgctttgatctgcgcttcatccgcatcgataaacagggagaccaggatgccggcatccgccaggcgttgacaggcatcgcgcatcttgtcgcgctggccggcgacgtccagcccgccttcggtggtcacttcctgacgcttctccggcaccaggcagcagaagtgcggtttggtttcgcaggcgatcgtcagcatctcttcggtgaccgccatttcaagattcatgcgggtgtgcagcgtctggcgcaggatacgcacatcgcgatcggtaatatggcgacggtcttcgcgcagatgcacggtaatgccgtcggcgccggcctgttcggcaatgaaagccgcctgaaccggatccgggtaagcggtgccgcgggcgttacgcaaggtcgcgatatggtcaatattgacccctaacaataattcagccatgacaatcctcgttaatcattattcgtattatcggctcgcgcctttcgcgcgggcataaactggcgaaacaactcccggctcttgagcggtttgccgccgagatagggcttcagggcgatacgggtaaagcgcttcgcggcgcgcagcgtatcaacatcaggaaactcgcgactcgccaatgctttcaaatggtgcccggtaaacgtgttgttatcaatcaccaggctggcaataaagcctttttcttcacgatagcggtaggtcatggtgtcgtctaccggctcgccgctcccggcgcagtggagaaaatccacgccataccccaggtgcccgagcagcgccagctcaaaacgccgcagcgcgggctccggcgagccgctggccccggcgagcgcctgaatgcagtgcaggtagtcgaaaaagagttcggagaagcgtgtttcgtgctccagcacgcgggagataagctcgttaacgtagagaccgctgtagagggtgatgccgctgagcggcagcgccagcgaaacggcttccgcgctgcgcagggttttgacttcgccgcgaccgccgaagcgaaccagcaagggggtaaagggctgtaaagcgcctttgagattagagcgtttggagcgtgcgcccttggcaaccaggcgcacacgaccggattcttccgtgaagacgtccagcatcaggctggtttcgctccacggacggctatgcaggacaaaggcgcgctgccatccatccacgttgcgttaactcagaggtcgtcaacgtaaccgagactgcgcagggcgcgctcgtcatcggcccagccggatttcactttcacccacagctcgaggtgcaccggcgcttcaaacatctcctgcatgtccttacgcgcttcgataccgatggttttaattttggcgcctttgttgccaatcaccatctttttctgcccttcgcgctcgacgaggatcaggccgttgatatcgtaaccgccgcgctcgttgctgacgaaacgttcgatttccacggtgacggagtacggcagctcagcgccgaggaaacgcatcagtttttcacggatgatttcggaggccataaagcgttgtgagcgatcggtaatataatcttccgggaagtgatggatcgcttccggcagatgcttacgcacgatcgccgcgatggtatcaacgttggtgccggtttccgctgagatcggtacgatatcgaggaaattcatctggctggcgaggaactgcaggtgcggtaacagatccgctttttcctgcacgttatccaccttgttgaccgcgaggatcaccggcgctttcgcgtcgcgcagcttgttgagcaccatctcgtcgtcctgcgtccagcgagtgccttccaccacgaagatgaccagttccacgtcgccaatcgaactgctggccgctttgttcattaagcggttaatggcacgcttctcttccatatgcaggcccggagtatcaacgtaaatcgcctgatacggcccttcggtatggataccgacgatgcggtgacgggtggtctgcgctttacgggaggtgatcgagatcttctgcccaagcagcttattcaacagcgtggatttgccaacgtttggacgacccacgatggcgacaaacccacaataacttttttcttcgctcattccagctccagctttttcagcgcctgttcggcggcagcctgctccgccttacgacggctggaacctgtgccaaccaccggttcactcaggccactgacctggcagtggatagtaaattcctgatcgtgcgcttcgccgcgaacctggaccaccaggtaagacggcagcggcagatgacgtccctgcagatactcctgcagacgcgtcttcggatccttttgcttatcgcccggactgatttcgtccagacgggtctggtaccaggagaggattaagcgttcaacgttctgaatatcactgtcgaggaaaaccccgccaattaacgcttcaacggtatccgcgagaatcgattcgcgacggaaaccgccgcttttcagctctcccggcccgaggcgcagacactcgcccagctcaaactcgcgggcgatctccgccagcgtgttgccacgcaccagcgtcgcgcgcatacggctcatatcgccttcatcgacacgaggaaagcgatgatacagcgcattcgcgatcacgaaacttaaaatggagtcacctaaaaattccaggcgctcattatgtttgctgctggcactgcggtgagttaatgcctgttgcaacagctcctgatgatgaaaagtgtagcccagctttcgttgaagccgattaattacgatggggttcatgcgttaccaataaatgaatgcgtcaaagatgcagcacacgaaaccgacctgagcattcgcttcaaacagtaatttgaaacagaccaatacgctttcgtgtgcagtgtcacccggcagagcgacaaccaaaaacttcggggggatattctatacgcaacgacacgggatgtcgttagtttgaatggatttaaatactaaataattcacgccgctgcgataacagcagcgacgtgaattcagcagaggaaattaatgaattccaccaatgcgcgataaccgcacgccggtcggccattcaccttcctgcttttcaaaactcatccagatagcggttgcttttccgaccaggttggcttccggcacaaagccccagtaccggctgtcggcgctgttatcccggttgtcgcccatcatgaagtactgaccgggcggcacaatccaggtggccagcggcagaccggactgatggtagtacatcccaacctgatcctgggcaatcggcaccatcagaattcggtgcgtcacgtcgcccaatgtctcctgacgctcggtaagacgaatgccgtcggctttggtttcgcccttcggcaactgccagaaaccgctgctcgcttcgccgccgttgctgcgggagaaggtctgaacaaaatcgctcggctccacgttggaataggtcaccggcagcgcgttgccgcaggcctgtccggaactgcagcccggctgaatagtgacctgtttggcaaccggatcgtaggtgaccttatcacccggtaaccccaccgcgcgcttaatgtagtccagacgcgggtcttccggatatttaaataccacgatgtcgccgcgcttcggatggccggtctcgatcagcgttttctggtagataggatctttaatgccgtaggcaaatttctccaccagaataaaatcgccgatgagcagcgttggcatcatcgaacctgaagggatctggaaaggctcataaataaatgaacgtaccaccagaacgatcgccagcaccgggaaaaccgatgcgccggtttccagccagcccggtttcgggccgactttcttcagcgtcttcttgtccagttgctcgccggtcgctgcctgagcagcggcctgacgttcacgacgtttcggtgcaaaaatgaacttgtccaggcaccataaaacgcccgtcaccagggttgcaatcaccaggatcagggcaaacatgttcgccatgccaactccttagggttatttgccgtctttaccaacgtgcagaatggcgaggaacgcttcctgcggcagctcaacgttaccgacctgcttcatacgcttcttaccttctttctgcttctgcagcagctttttcttacggctgacgtcgccgccgtagcatttcgccaggacgtttttacgcagctgtttcaccgtagagcgcgcgataatgtggttaccgatggccgcctgaatcgcgatatcgaactgctgacgcggaatcagatctttcatcttttccaccagctcgcggccgcgatacggcgcgttatcgttgtgggtgatcagcgccagcgcatcgacgcgttcaccgttgatcagcacatcgacgcgaaccatgttcgacgcctggaagcgtttgaagttgtagtccagcgacgcatagccgcgggaggtggacttcaggcggtcgaagaagtcgagaaccacttccgccatcggaatttcataggtcagcgccacctgtttaccgtggtaaaccatgttggtctgcaccccacgcttctcgacacacaaggtaatcacgttgccgaggaactcctgcggcagcagcatgtgacactcggcgatcggctcgcgcagctcctgaatattattcagcggcggcagcttggacgggctgtcgacgtagataacttctttggaggtggtctctacttcgtagactaccgttggcgcggtggtgatcaggtcgagatcgtattcacgctccagacgctcctgaatgatctccatgtgcagcaggccgaggaagccgcagcggaagccgaagcccagcgcggtagagctttccggctcgtagaacagagaggcatcgttaaggctcagtttgcccagcgcgtcgcggaaagcttcataatcatcggagctcaccgggaacaggccggcatacacctgcggtttcaccttcttaaagccaggcagcgctttgtctgccgggttgcgggcggcggtcagggtatcgcccaccggcgcgccgaggatgtctttgatcgcgcagaccagccagcctacctcgccgcatttcagctcggtacggtcaacctgtttcggggtgaagatgcccagacgatcagcgttatagacctggccggtgctcatgaccttgatcttgtcgcccttgcgcatggtgccgtttttaatccgcaccagcgacaccacgccgaggtagttatcgaaccaggagtcgataatcagcgcctgcagcggcgcgtccggatcgccttccggcggtgggatatcgcgcaccagacgctccagcacgtcggtcacgccgacgccggttttcgctgagcagcgcaccgcgtcgtgggcgtcgatcccgacgatatcttcaatctcgtccgctacgcgctcagggtcggccgcaggcaggtcgatcttgttgagtaccggaaccacttcgagatccatctccatggcggtgtagcagttggccagggtctgggcttctaccccctgcccggcgtctaccaccagcagcgcgccttcgcacgcggcaagagaacgggaaacttcataagagaagtccacgtggcccggggtgtcgataaagttcagctggtaggtctcaccgtcgctggccttatagtccagggtgacgctctgcgccttgatggtgatcccgcgttcgcgctcaagatccatggagtccagaacctgggcttccatttcacgatcagaaaggccaccgcaaatctggatgatacggtcagacagcgtcgacttaccgtggtcgatgtgagcgatgatcgaaaagttacgtatattcttcatatttagagttaattatgccttacgagtatcatgaggccgctgtactgtgcctgacgttttttaatccgaaaacgccgcattctacactacatccgcgaaaccaggaaatgctgttagatccagcatacccgcagaaattgtggcgttgtaacaggaaaggtaaataaagataagggccagtgaaatcactggcccatgtcggaggaaggcgtatcaacacgcagcagatccggcggcagtgcgacgttcaaaatcaccggctgccaggactgacgtgccgccagtcgcggcgacagaccgcgcgccaccaggaagccgccgacgccgcccagcagcgcgccgcaaagtgacgcaatatcgctggcaaacagcacctgaaaaatagacgccattacaaacagccccgccagcggcgccatatacaccagcatcgctgagcccagcaggctgctttcagcgatccccagctccactttttgccccgcggccaacggctgctcgcagggcacgctaatggtatggctggtctgcggccccagcttgtttagcacccggctaccacagccggcacgggaggcgcagctgctgcaggaggctttaacgtcgcagtgcacctgcgccacgccgttatgccaggaaaccacggtagcccactctttaatcattgtactgccttgaatttaatactgtcagagatacgcttcgccgtctgcggcggcagctcacccactacggttatctccgcgttatcgcgcaccgtcgtgctgacggtgcgtcggccggtgcgcaacagctggtcgctgctggccgccgtggcgcggttgatattgatcgagaagctgaacaagccgtcggaatagagacgtgattctaccggaccgtcaaaggtgggaagacggcgctggctgctggaaacctcagtcacgccttgcgggagccacgtcggcgcccagttgaagttggctttgtcgcctccttcaggcaccgacagctgcggcggcaaattcgcttttgccagcgtctccatgctggcgctgacgttatcgccaacgttgaaggagacgacccggaactgctccagcgtttccccgtcgcggtcgagcaaatcgacgcgcagcggcagcttggtttcagcatccagccaggcgataaagctgtagcgcgtgccgtcgcgagccacgacgcggatcacgtcgcagaggcggtcagcgatacgggtacggcccacggagataaaatcatacgccgcggagaggcgtttgaaatcgctatataccagcgatggcagcgaatcgacgatatagtcgccgttcagggtgaacggatcgagaccgggttcaaaatagctgatttccgtgccgcgcaggaccacttcccggcgcggaccgtccagctgcagcaactgcgccagcggttggttgttcagtcgcgcgtgacgatagcgcagcgactcaacgccttgtttgctgatgctaacaaaagacagctcataattgagagactggctggccaggttcatctgctgcaacaacgccccggacgatgtatcagccgaggcgttgacagagaacaacaggctgcctgccatgagcgacatggcacaccaaagttgcttcattactgcgattgtgttcctaaagtttgatagcccggtacctggactgcggcctgctgagtctgggcctggccaaactgaagctgctcagcgtgcaggcggcgctgcagttcgtagtcctgcagcatggcgttaattcggcggcgctgttcctggacctgcgcctgctggccgcttcccgctgacgcgtcagccggcacgccaagacttaccgggcttgctttacccatcatgggcagcgtattgaacaccggcgcttctggctgctgagcggaatcagactgaccattatagtgctggacgccgacgataaccgcaagcgatacacaggcggcaacgcccatttgagtcagggagctggcccatggacgcaccttgttccagaacggcatctgccgccactgatgcggcgcgggctgagattcaggaataagcggcgccgtctgacgaacgggctcattttcaatggcggccatcacccgggcggagatatcaaattgcagcacctcagcggtatcgccacgcagcgtatcgcggataaggtgataactctcccaggttttttgcatctcagaagaacgactcagctcgttgagcagttcgttatccagcgtttcaccatccattaaagccgaaagtttttctttctgcatgcctgatacccttttccagtattccgctatcgtcaacgcctgataagcggttgaactttattatcaatagcttctcgcgcccggaagatacgcgaacgcaccgtcccaaccggacaatccatgatagcggctatctcttcatagctcaggccatccagctcccgtaacgtaattgccatgcgtaaatcttccgggagcgattcaatggtacgaaaaactatttgtctcagttcttctgacaacattaagttctcagggttcgaaatttctttcaacgccccgccgctttcgaagttttccgcctcgttggcgtcaacatcgctggacggcggacggcgcccctgagcaaccagataattcttcgccgtgttgacggcgatacggtataaccaggtgtaaaaagcgctatctccccggaaagagtccagcgcacgccatgccttaacgaacgattcctgaacaacgtcagcgatatcgcccggcggtacatagcgggaaaccaggctcgcgaccttatgctgatagcgcactaccagcaaattaaacgctttctgatctcctttctggacccgttcaacaaggacctgatccgttaactgctcgctcatccgaggtaatgtctccccaaacccaattcccatgcgtcttcaaaacaccacccaaaatctgcattatgagcaagctgactgttggagtgcatgaaaacaataaagttccgttacgctttttgttttttgtctggcaacggcggcagatcgttatcaatcattatatgcccaggttgctaaacgataggtaagtcaataagaaaaagcgcaggcccgtctgaagggtatcgtaacacgccgtttatttcactataaaatccaatgccatcaaccttccccgcgtctcattttcagcgcgcaagacgccgtttccgttcgccttttgtttagccgtcacaacagcagacaaaaaaattgtacgattcctcacggaccggtgctattgtgagctaaatgtgtttagtaaattaaacaaagacaatgaataccactcctgacttctcttgtgatgtgttgattatcggcagcggcgctgccggtctttcccttgccctgcgcctggctgagcacagttcggtgaccgtgctgagtaaagggccgatcagcgaaggttcgacgttctacgcccagggtgggattgccgccgtcttcgatgagacggacagtattgaatcccatgtcgaagataccctcatcgccggcgcggggctctgcgatcgtcatgcggtcaccttcgtcgccagcaacgcccgatcatgcgtccagtggcttatcgatcagggagtgctgtttgacacccaggtccaggccaatggcgaagagagctatcatctcacgcgcgaaggggggcacagccatcggcgcattcttcacgccgccgacgccaccggcaaagcggtagagacgacgctggtcgataaagcgcttgcccatcctaatatccgcatccttgagcgcagcaatgccgtcgatttaatcgtatcggataagattggcctgccgggcacccgccgggtggtcggggcatggatctggaatcgtaataaagagcgggtggaaacctgcagcgcgaaagccgtagtactcgctaccggcggggccgcgaaggtttatcaatataccactaaccccgacgtctcttccggagacgggattgcgatggcctggcgggcgggatgtcgggtggcgaatctggagtttaaccagttccaccccaccgcgctatatcacccccaggcgcgtaatttcctgcttactgaagcgctgcgcggcgaaggcgcccaccttaaacgcccggatggcacccgctttatgccggactttgacgagcgcggcgagctggccccgcgcgatatcgtcgcccgcgccatcgaccatgaaatgaagcgcctgggcgtagactgtatgttccttgatatcagccataaacccgaggcgtttgttcgccagcatttcccgatgatttatgaaaagctgctcggcctgggaattgatttaaccaaagagccggtgccggtcgtccccgccgcgcattacacctgcggcggcgtgatggtggatgataatggccgcaccgacgtcgatggtttatacgccatcggcgaagttagctacaccgggctgcacggcgcgaatcgtatggcgtcgaactcgttgctggagtgcctggtctatggctggtccgccgcggaggatattgcccggcgcctgccgctcgcccagaaggtcgccacgctgccagcatgggatgaaagtcaggtggagatcccggatgaactggtggttatccagcacaactggcacgaactgcgcctgctgatgtgggattacgtggggattgtgcgcaccacccgcaggctggagcgcgccctgcggcgcattaccatgctccagcaggagctggatgagtattacgcccgcttccgcgtctcgaataatttgctggaactgcgcaatctggtgcaggtggcggagcttatcgtacgctgcgcgatgttgcgtaaggagagccgcggtctgcattataccctcgactatccgcagccgctgcctgacagcggcccgtcgatactctcgcccctggctcacataaagagataaaagtcctcggtcagagcggtaaagccttccgaatattgctgctctggcccgcggatcgccagcctgtcgctgaaacactcccctgccgtcggggagaaagccagcagcacccgatgcggcggtcgcagctcggtctccgccacgtcagtacgcagtcgcagatgccagcccatcgcccttgcccgttcgatgaacgcattaccaatatccaccggcaacaccacgcaaaaaaaaccttcttcggtaatatgctctgcggcacaggtcagcagggaggcgtgatcgagcgtagtggtgtaccgcgcctgctctcgctgcgaggtcgcgcatggcacgccttcggcaaaaaagggcggattactgattatcagttcatagcgtcgagtttgcgacggctgccactgatgaatatcggcctgccagacctcaatccgcgaagcccacggcgacgcgagggcgttttcccgcgcctgagcggcggcctcttcgtccagttctaccgcctcgacatgcacatcatctccggtacgctgcgcgagcatcagcgccagcaagccgctgcccgcgccaatatccagcacatgcttcactccggcaatcggcgcccaggcgcccagcaaaatgccgtcggtacccaccttcatggcgcagcgatcgtgagcgacaaagaaccgtttgaaggtaaaaccattgcgcggcagcgcaaacttcgactgagacatcctcaataaccttgccgacaaaaactcctgaacctaaggctatgcacaataccggagaacagatagccttacaaacagatgaacattacgtcagtaacgtctataatcggcggcccactcagaggtagaacatgactgtaacgactttttccgaacttgaactcgacgaaaacctgctggaagccctccaggataaaggtttcactcgcccgacagccattcaggccgccgctattccgcctgcgctcgatggccgtgacattctcggttcagcgccgaccggcaccggtaaaacggcggcgtatctgctgccagcgttgcagcacctgctcgatttcccgcgtaagaaatccggcccgccgcgcattcttatcctgacgccgacccgtgagctggcgatgcaggtggccgaccacgcccgcgagctggcgaagcatacccatctggacatcgctaccattaccggcggcgtggcgtacatgaaccacgcggaagtgttcagcgaaaaccaggacatcgtagtcgccaccaccggtcgcctgctgcaatatattaaagaagagaatttcgactgccgcgccgtcgagaccctaatcctcgatgaagccgaccgcatgctggatatgggttttgcccaggatatcgaaaccatcgccggtgaaactcgctggcgcaagcagactatgctgttctccgcgacgctggaaggcgatgcgatcaaagactttgctgagcgtctgctggaggagccggttgaagtttccgccaatccgtcaacccgcgagcgtaagaaaatccatcagtggtactaccgcgccgacgatatcgaacataaaaccaaactgctggtgaatctgctgcaacagccggaagccacccgcgctatcgtgtttgtgcgtaagcgtgagcgcgtgcatgagctggctaactggctgcgtgaggccgggattaacacctgctggctggaaggcgagatggtgcaggccaagcgaaacgaagctatcaagcgcctgaccgacggccgcgtcaacgtgctgatcgccaccgacgtcgctgcccgcggtatcgatattccggacgtcagccacgtctttaacttcgatatgccgcgtaccgcggatacctacctgcaccgtatcggtcgtaccggccgcgccggtaaaaaagggaccgccatttctctggtcgaggctcatgaccacctgctgctgggtaagattggtcgctatattgaagagccgttgaaagccagagttatcgatgaactgcgcccgacgacccgtgcgccgagcgagaagctgacgggtaagccatcgaagaaagtgctggcgaagcgtgcgcagaagaaaaaagatgaaaaagagaaaccgcgggtgaagaagcgccaccgcgatacgaaaaatatcggtaagcgccggaagccaagcgcggccgggacgccatcagcgtccagcgatgagtaaaaaaaacgccgggatatcccggcgttttcacatctggcgttagccttacaggctttcggtaaaggtacgggcgattacgtcgcgctgctgttccggcgtcagagagttgaagcgtaccgcgtagccggaaacacgaatggtcagctgcggatatttttccggatgctcaaccgcgtccagcagggtttcgcgacgcagcacgttaacgttcaggtgctgaccgccttcgacgcgcacttccggtttcacgtccaccgggatttcacggtattcgatttcacccagtttgcttaccgcaaccacatcatcttccgcaaaaccacctttggcgcacaggcagcgcgcttcgcctttttcgctatccagcagccagaaagagttgagcaggtcgtcgtttgccgctttagtaatttggataccagtaatcatttgatgcctcccaggcagtgtttattcgattttggcctcttcgcggccaattggtaaaaccattgttgtatgagtgtatatatatcagccgcaccctcggcattccttgatataaatcaataaaagccactcacccaacgtgggtataggaggtttttattgttttacatcaagttacgccattgtgagctataaataattttgtaaattttcaattttttttgcataaaagccggcatcaggccgtgccgattttgttctatagaaagaagccgttaagctatagcgatgacccttttgcaggagagcaagatgaccacccctttaacctggcatgacgtgctggcggatgaaaagcaacaaccctattttctcaatactctgaagaccgtcgccgaagagcgccagtcggggatcaccatctatccaccgcaaaaagacgtcttcaatgcgtttcgctttactgaactgggcgatgtcaaagtcgtcattctcggccaggacccctatcacggcccgggtcaggcccatggtctggcgttctcagttcgtccgggcgtcgcgatcccgccttcgttgctgaatatgtataaagagctggaggccacgatccccggctttacccgccccacccacggttatctcgaaagctgggcacgacagggcgtgctgctgctgaatacggtcctgaccgtccgcgccggacaggcgcactcgcacgccagtctgggctgggagacctttaccgataaggttatcgctttaatcaatgagcattgcgagggagtagtttttctgctgtggggctcccatgcgcagaagaaaggcgcgattatcgatcgtcagcgccactgcgtgctgaaggcgccgcatccatcaccgctctctgcgcatcgcggcttctttggctgcaaccatttcgtacagaccaaccagtggctggttgaccgcggcgaaacgccgatcgactggatgccggtccttcccgctgaaagcgagtgattgacagccataaaaaaagccagcatcagctggcttttttgcattcaggcaggcgaatcacgccttgttctgacgccaccattccgccagcaggacgccggtcgccacagagacgttcaggctttcaacgttgccggtaccgtcgatggcaacgctgagatcggcgctggaaatcgccgcatcggacagaccatcacgttcctggcctaacgccagcaccattttcttcggcagctcggctttaaacagcggggtaccattatggctggacgttgagacaatcgcgtagcccgctttgcggaactgatcgagggtatcgataaagctgtcgccggtgatcggttcaacatgctccgcaccgccctccgccgtacggatcgccgccccggactccagcacgccggcatcctgaaccaccacgcccttcacgccaaagtgcgcgcagctgcgcatgatcgccccgagattatgtgggttacccacatcttccagcgccagaacgcaatcttcttccccggccttcgcgacccattgagcaacagaagtgccgtggcgttttttgatcaggaagcagacgccgccgtggtgctcggtgccggaggctttcgccagctcggcttcgtccaccacgtgataggccttacggttggccgccatccagcgcagcgcctctttaaagcgcggcgtcacgctctgaataaaccaggcgcgaacgatagcttccggacggctctggaacagcgcctggcaggcgttttcgccatatacgcgggtctcttccgcacgctgacgacgcagcacttccggatcgataaagctcttcccgctgatcccgccgtgatcttcttttaccggcgtctcatcgccaggagcgcgggaaacggtacgccacggagacgcatcgtcgcgatgaaaatcatcgcgtttgcgatcgtcacgcttacggtcgtcacgtttgcgatcgtcgccgcggctgtttcgttcgtcacgcgcagggcggctgcggccgtcaacacgagattttcctggacgacctccccctttcccggtacgtgggttatgggtgcgtttgtcagaatcatcatcactgcggacatacatcactttgaccttgccgcttttatttttcagttcgtcgctcatcatttttctccacctgcgctgcgcgaagcgcgcagattacccgatgtgccatcgcttcgccatgatttcgtttaaaagccggcctctattgcactcatcgaacaaaacgcattgtcctcaaataacacttcatcgataatatgtaacatcacagaaacatatcggccacgtgccacgttgcaacccataaccagaggttagttatgaataccgtttgtgccagttgtcaggctctgaaccgcctcccggacgatcgtagcgcggatggcgcaaagtgcggacgctgcggtcacgatctttttgacggcgacgtcatcaacgcgaccggggcaacgctggataaactcttgaaggacgatctgccggtcgttgtcgatttctgggcgccatggtgcggaccctgccgtagcttcgcgccgatctttgaagacgtcgcggaagagcgtagcgggaagatgcgttttgtgaaagtcaacaccgaagcggaacgtgagcttagcgcccggtttcgtatccgcagcatcccgaccattatgatgttcaaaaatggcgaagtgatcgacatgctcaatggcgcagtgccaaaagcgccattcgatagctggcttaacgaagccggccaacaataacccttccggggcaccgcttgtgccccgttttcacctctgcgacaatagcgtttttcactagcgactcccatgactgataacgctgtccttcgcctgcgcgccgaacgtctcgcgcgagctacccgccctttccttgcgcgcggcaatcgcatccgccgctgccagcgctgtctgctgccgctcaagcagtgcctgtgcgccacgttaacctcagcgcaggccgccagccgcttctgcctggtgatgtttgatacggaaccgatgaagcccagcaacactggccggctcatcgccgatattctgccagataccgaagcgtttcagtggtcgcgtaccgaaccgccgcaggcgctgctcgatctggtcgcccatcctgattatcagcccatggtcgtatttccggcctcctatgccgggccggatcgccaggtcctgagcgcgccgccgtccggtaaaccgccgctgtttatcatgctcgacggcacctggaccgaagcgcgcaaaatgttccgtaagagtccttatctcgacgcgctgccgattatctccgtcgatctgtcgcgcatctctgcctaccatctgcgcgaggcgcacgccgacggacaatattgtaccgcggaagtggccatcgccctgctggatctggcgggcgatgccccggccgccgctgcgcttggcgagcacttcacccgcttccggacccgctatctggcgggaaaaacccagcataagggcagtatcacagcgggccaggtggaaaacgtttaaaatcattcggtcactgggatgaaaggagaccggtatgagccaacgaggcctggaagcgctgctgcgaccaaagtccatcgccgttattggcgcatcaatgaagccgcagcgcgctggctatctcatgatgcgcaacctgttagccggcggcttcaatggcccggtgatgccggtcacccccgcctggaaggcggttcttggggtactggcatggcctaccatcgagagcctgccgtttaccccggatctggcggtgctctgtactaacgccaggcgtaatctcgaattgctcgaagccttagggcaaaaaggctgcaagacctgcatcatcctctcttcgcagccggaacagtacccggcgctgctcgaatgcgccgcgcgctatcagatgcgtctgctcggccccaacagtctcggactgctggccccatggcaagggctgaacgccagcttttcaccggtgccgatccatcgcggtaaactggcctttatctcgcagtcggccgccgtctccaatactatccttgactgggcgcaacagcgcgagatgggtttttcctacttcatcgccctgggcgatagcctggatattgatgtcgatgacctgctggactttctggcccgcgacagcaagaccagcgccattttgctgtacctcgagcatctcagcgacgcgcgccgctttgtctccgccgcgcgcagcgcttcgcgaaacaaacctatcctggtgattaaaagcggccgtagtccggcggcgcagaagctattgcacgccaattccgggatggacccggcatgggatgcggccattcagcgcgctggtctgctgcgggtgcaggatacccatgagctgttctctgcggtggaaacgctcagccacatgcgcccgctgcgcggtgaaaaactgatgatcgtcagcaacggtgcggcgccggcggcgctggcgctggatgagctttggttgcgaaacggtaagctggcggctctcagcgaggagacgcgcgacgccctgcgccaggcgttgccggttggcgtggagatcgccaacccgctggatctacgcgatgacgccagtagcgaacactatcagcgggcggtgaatgttttgctcaacagtcaggactatgacgcgctgctggtgatccactctcccagcgccgccgcgccgggcaccgagagtgccctggccctgattgacgctctgaagcatcacccgcgcggtaaatatgtcaccgtactgaccaactggtgcggcgaattttcctctcaggaagcgcgacgtttattcagcgatgccggcctccctacctaccgtacgccggagggcacgatcaccgcttttatgcatatggtggaataccgtcgcaaccagaaacaactgcgcgagacgccggtgctaccagactccttaaccgccaataccagcgaggcgcatgctctgctgcagcaagcgatagaagacggcgccaccacgctggatactcacgaggtcagcccggtgcttcgggcctatggcatccacacgctgccaacctggattgccgctgacagcgcggaagcggtgcatatcgctgagcagataggctatccggttgcgctgaagctgcgttctccggatatcccgcacaaatcagaagtacagggggtcatgctctatttgcgtaccgccgccgaggtgcagcaggctgcagatgcgatgatcgatcgcgtcaaactggcctggccccaggcgcgcatccatggattgctggtgcaaagcatggccaatcgcgctggcgcccaggagctaagagtagtggttgagcacgatcccgtcttcggcccgttgattatgctgggcgagggcggcgtggagtggcgggccgaggaccaggccgccgtggcgctgccgccgctgaatatgaacctggcgcgttatctggtgatccaggcgatcaaaaataagaagatccgcggccgcagcgccttgcgcccgctggatatcgctggcttaagccagctgctggttcaggtctcgaacctgatcgtcgactgcccggagatccagcgcctggatattcatcccctgctcgcctccggcaacgagtttacggcgctggacgttaccctggggcttgctcccttcagcggcgacagtgaaagccgtctcgctattcgtccctatccgcaccaactggaggagtgggtggtgatgaaaaatggcgatcgctgtctgttccggccgatcctcccggaagatgagccacagttgctcgcatttatcgcccaggtcaccaaagaagatctctattatcgctattttagtgagatcaacgaatttacccatgacgacttagccaatatgacccagatcgactacgatcgagaaatggcgttcgttgccgtcaggaccagcgcagagaagagcgagatcctcggcgtgacgcgggcgatctccgatcccgataatattgacgccgagtttgccgttctggtccgttcagatttaaaagggttaggcctggggcgaaggttgctggaaaagctgatcgcctatacgcaaagccatggcctgcggcgccttaatggtattacgatgccaaataaccgaggcatgataggcctcgccagaaagctgggattcaccgtcgatattcagctggaagatgggattgtcagcctgtcgctgcccctgaatcagggataatcgcgcgacgctgaccgcaattgttgaccacattagcgggtagtaatggtattattgcccgcttacgtcgtctgcatggtacagaagacccttcaataaacagagaagaaacgcactgtgatgttgtcaaaatttaagcgtaataaacatcaacaacaccttgcccaactccctaagctttctcagtcagttgatgatgtagagttcttttacgcccctgcggaattcagggaagcgttactgacccggattgcccacgccactcagcgtatatgcattattgcgctctatctggagcaagatgatggcggaaaaggaattttgcaggccctttatgacgccaaacgccagcgtccggaactggatgtccgcgttctggtggactggcaccgcgctcagcgtggccgtatcggcgccgccgcctctaataccaatgccgactggtattgtcggatggccaatgaaaatccaggggtagatatccccgtttacggcgtgccgattaacactcgggaggcgctcggcgttctccatttcaaaggctttattattgatgactgcgtcctctacagcggcgccagcctgaatgatgtttatctgcatcagcatgataagtatcgctatgatcgctatcagtgcatccgtaacggcaaaatggcggacatcatgttcgactgggtcgacaacaatctggttcaggggcgcggcgttaaccgtctcgacagaccggatcggccaaaaagcccggaaatcaaaaacgacattcgccagtaccgtcaggagctccgcgaccgcagctaccattttgtcggcaccgctggtgacgaagaactctccgtcaccccgctggtaggcctgggtaaatcgagcctgctgaataaaaccatctttcacctgatgccctgtgccgaacacaagctgacgatctgcaccccctacttcaacctccctgccgtactggtaagaaatatcatccagctgctgcgcgatggaaaacaggtggagattattgtcggcgataaaacggctaacgatttctacattcctgaagatcagccgtttaaaatcatcggcgcccttccctatctgtatgagatcaacctgcggcgtttcctcagccggctgcagtattatgtcaataccgatcagctgatcgtccgcctgtggaaggatgatgataacagctaccacctgaaaggcatgtgggttgacgatgagtggatgctgctcactggcaacaacctgaacccgcgcgcctggcggctcgatctggaaaacgccattctgatccacgatccaaagcggcagttgggggccatgcgggagaaagagctgaagctcatccgcacccacaccacggtagtgaaacattatcgggatctgcaaagtatcgccgactatccggtgaaagtgcgaaaactgatccgccgcctgcggcggatccgcattgaccggctgatcagccgtattctctgactatcagccccgcctcgacggggcttttttctggaagcgctatgcgtacgataatagtgattgcttcgctgctgttaaccggctgcagccacatggcaaatgatgcatggtccggtcaggacaaagcccagcattttctggcctcagcgatgctctctgccgctggcaatgaatatgcgcaacatcagggttacagccgggaccgcagcgccgctatcggcctgatgttttccgtcagccttggcgcctcaaaagagctttgggacagccgcccggctgggagcggctggagctggaaggattttgcctgggatgtcgccggcgcgaccaccggctacgctgtatggcagttggctcatcagtaagcgttacagacgcaaccccttccctttgcgatgcaacatcagggagacaaggaaggcaatggcggccatcaccgtcacataccagtagaacgcgtgctctatccctgccgacttaagcgacagcgcgacgtactccgcagagccgccgaacaatgcgttcgcgacggcataggacaacccgaccccaagcgcgcgaacctgagccgggaacatctctgctttcaggatgccgctgatcgaggtatagaaactgacaatcagtaaggcgcagatcaccaggccgaaggcggcatagggtgagctcactttttgcaaggcgctgagaataggcacggtaaataacgtcgccagcacgccaaagcacagcatggaggtccggcggccaactttatccgagaaggcgccgaatagcggctgaaccagcatataaacgaacagcgccgcggtcatgatcacgctggcggtgctggccgtcatgcccgccgtgttgaccagatacttttgcatataggtggtgaaggtgtagaaggtcagcgatccggcggcggtaaagcctaacaccatcgcaaaggcccggcgattgcgccacaaccctttaaatgagccagcctctttcagcgcccgggtctcctgcttcgaggtttcgtccagctggcgacgcagccacagcgcgacgatagccagtaccgccccgagggcaaaaggaatacgccatccccaggcatggagatcttcatcgctaagcacctgctggagcgccacaaccactaatacagccagcagttgaccaccaatcagcgtaacgtactggaaggaggcatagaagcctttctttccctccaccgcgacttcactcatataggtcgcactggtgccgtattctccgccaacagacagcccctggaacagacgcgccagcagcagcagcgccggggcccaggtgccgatcaccgcataacccggcagacaggcaatcaccagtgagccaaagcacatcatgcagaccgagataagcatggacgttttacgtccccggcggtcagcgatccgaccaaacagccatccaccgataggacgcatcagaaatccggcggcaaatacgcctgccgtttgcagcagttgggtggtggtatttccggatggaaagaagatgtgcgcgaaatagagcgagcagaatgagtaaacgtaaaaatcaaaccattcaaccagattccccgaggaagcgccaacaattgcccaaatacgacgacgggtatcggccagttccggcgcgccccgttcggtaatgctactttctgtcattgttatattgctccagcaaagactgcaatctgtcttgtcgggcgtaccacgtcacgcagacaaattaattagtaaactaaatgttatataattgttatatttttatatgtgattggattcacattttttttcgcaagcacggttttcgcgatcatcgccagcgcaggggcagggaaaaagtggattatggcgaagggattgccatgacggggttttattttgcgttgaaaggagataatggagcgaacatggcgtaattttcgccggaggcggtgctgcgcactttgtccggggtacggttttgtagccccggtaagcgcagcgccaccggggaggcataccggcacgctggccggacgacagaaacgcaaaaagcccatccggcaggatgggctcttcacttgtttgatgcctggcagttccctactctcacatggggagaccccacactaccatcggcgctacggcgtttcacttctgagttcggcatggggtcaggtgggaccaccgcgctagtgccgccaggcaaattctgttttatcaacacgtcttaccaacgtatcgattaatctgtatcagagctgaaaattctctcaatccgccaaaacatcttcggcgttgtaaggttaagcctcacggttcattagtaccggttagctcaacgcatcgctgcgcttacacacccggcctatcaacgtcgtcgtcttcaacgttccttcaggagacttaaagtctcagggagaactcatctcggggcaagtttcgtgcttagatgctttcagcacttatctcttccgcatttagctaccgggcagtgccattggcatgacaacccgaacaccagtgatgcgtccactccggtcctctcgtactaggagcagcccccctcaattctccagcgcccacggcagatagggaccgaactgtctcacgacgttctaaacccagctcgcgtaccactttaaatggcgaacagccatacccttgggacctacttcagccccaggatgtgatgagccgacatcgaggtgccaaacaccgccgtcgatatgaactcttgggcggtatcagcctgttatccccggagtaccttttatccgttgagcgatggcccttccattcagaaccaccggatcactatgacctgctttcgcacctgctcgcgccgtcacgctcgcagtcaagctagcttatgccattgcactaacctcctgatgtccgaccaggattagctaaccttcgtgctcctccgttacgctttgggaggagaccgccccagtcaaactacccaccagacactgtccgcaaccccggtcaggggccaacgttagaacatcaaacattaaagggtggtatttcaaggttggctccacgcagactggcgtccacgcttcaaagcctcccacctatcctacacatcaaggctcaatgttcagtgtcaagctatagtaaaggttcacggggtctttccgtcttgccgcgggtacactgcatcttcacagcgagttcaatttcactgagtctcgggtggagacagcctggccatcattacgccattcgtgcaggtcggaacttacccgacaaggaatttcgctaccttaggaccgttatagttacggccgccgtttaccggggcttcgatcaagagcttctccttacggataaccccatcaattaaccttccggcaccgggcaggcgtcacaccgtatacgtccactttcgtgtttgcacagtgctgtgtttttaataaacagttgcagccagctggtatcttcgactggtctcagctccatccgcagggacttcacctacacaccagcgtgccttctcccgaagttacggcaccattttgcctagttccttcacccgagttctctcaagcgccttggtattctctacctgaccacctgtgtcggtttggggtacgatttgatgttacctgatgcttagaggcttttcctggaagcagggcatttgttacttcagcaccgtagtgcctcgtcatcacacctcagccttgattatccggatttgcctggacaaccagcctacatgcttaaaccgggacaaccgtcgcccggctaacatagccttctccgtccccccttcgcagtaacaccaagtacaggaatattaacctgtttcccatcgactacgcctttcggcctcgccttaggggtcgactcaccctgccccgattaacgttggacaggaacccttggtcttccggcgagcgggcttttcacccgctttatcgttacttatgtcagcattcgcacttctgatacctccagcatgcctcacagcacaccttcgcaggcttacagaacgctcccctacccaacaacacatagtgtcgctgccgcagcttcggtgcatggtttagccccgttacatcttccgcgcaggccgactcgaccagtgagctattacgctttctttaaatgatggctgcttctaagccaacatcctggctgtctgtgccttcccacatcgtttcccacttaaccatgactttgggaccttagctggcggtctgggttgtttccctcttcacgacggacgttagcacccgccgtgtgtctcccgtgataacattcttcggtattcgtagtttgcatcgggttggtaagtcgggatgaccccctagccgaaacagtgctctacccccgaagatgagttcacgaggcgctacctaaatagctttcggggagaaccagctatctcccggtttgattggcctttcacccccagccacaagtcatccgctaatttttcaacattagtcggttcggtcctccagttagtgttacccaaccttcaacctgcccatggctagatcaccgggtttcgggtctataccctgcaacttaacgcccagttaagactcggtttccctgcggctcccctatacggttaaccttgctacagaatataagtcgctgacccattatacaaaaggtacgcagtcacacccgaaggtgctcccactgcttgtacgtacacggtttcaggttctttttcactcccctcgccggggttcttttcgcctttccctcacggtactggttcactatcggtcagtcaggagtatttagccttggaggatggtccccccatattcagacaggataccacgtgtcccgccctactcttcgagttcacaacctgtgcattttggtgtacgggactatcaccctgtaccgtcggactttccagaccgttccactaacacacaagctgattcagactctgggctgctccccgttcgctcgccgctactgggggaatctcggttgatttcttttcctcggggtacttagatgtttcagttcccccggttcgcctcgttaacctatgtattcagttaacgatagtgcaacgaattgcactgggtttccccattcggacatcgccggctgtaacggttcatatcaccttaccgacgcttttcgcagattagcacgtccttcatcgcctctgactgccagggcatccaccgtgtacgcttagtcgcttaacctcacaacccgaagatgtttcacttctgattgcgaaaatttgagagactcgaacacacttaaacagtgtgtcgtttcaattttcagcttgatccagatttttaaagagcaaatatctcaaacgtcacccgaagatgagttttgagatagttcggcacgcgtctttcactcacgaaccagcaagtggcgtcccctaggggattcgaacccctgttaccgccgtgaaagggcggtgtcctgggcctctagacgaaggggacactgaagtctcaatcgcaagacgccttgcttctctactttcatcagacaatctgtgtgagcactacaaaggcaggttctttaaggtaaggaggtgatccaaccgcaggttcccctacggttaccttgttacgacttcaccccagtcatgaatcacaaagtggtaagcgccctcccgaaggttaagctacctacttcttttgcaacccactcccatggtgtgacgggcggtgtgtacaaggcccgggaacgtattcaccgtagcattctgatctacgattactagcgattccgacttcatggagtcgagttgcagactccaatccggactacgacatactttatgaggtccgcttgctctcgcgaggtcgcttctctttgtatatgccattgtagcacgtgtgtagccctggtcgtaagggccatgatgacttgacgtcatccccaccttcctccagtttatcactggcagtctcctttgagttcccggccgaaccgctggcaacaaaggataagggttgcgctcgttgcgggacttaacccaacatttcacaacacgagctgacgacagccatgcagcacctgtctcacagttcccgaaggcaccaaagcatctctgctaagttctgtggatgtcaagaccaggtaaggttcttcgcgttgcatcgaattaaaccacatgctccaccgcttgtgcgggcccccgtcaattcatttgagttttaaccttgcggccgtactccccaggcggtcgatttaacgcgttagctccggaagccacgcctcaagggcacaacctccaaatcgacatcgtttacggcgtggactaccagggtatctaatcctgtttgctccccacgctttcgcacctgagcgtcagtctttgtccagggggccgccttcgccaccggtattcctccagatctctacgcatttcaccgctacacctggaattctacccccctctacaagactctagcctgccagtttcgaatgcagttcccaggttgagcccggggatttcacatccgacttgacagaccgcctgcgtgcgctttacgcccagtaattccgattaacgcttgcaccctccgtattaccgcggctgctggcacggagttagccggtgcttcttctgcgggtaacgtcaatcgccaaggttattaaccttaacgccttcctccccgctgaaagtgctttacaacccgaaggccttcttcacacacgcggcatggctgcatcaggcttgcgcccattgtgcaatattccccactgctgcctcccgtaggagtctggaccgtgtctcagttccagtgtggctggtcatcctctcagaccagctagggatcgtcgcctaggtgagccgttaccccacctactagctaatcccatctgggcacatctgatggcatgaggcccgaaggtcccccactttggtcttgcgacgttatgcggtattagctaccgtttccagtagttatccccctccatcaggcagtttcccagacattactcacccgtccgccgctcgtcacccgagagcaagctctctgtgctaccgctcgacttgcatgtgttaggcctgccgccagcgttcaatctgagccatgatcaaactcttcaatttaagtttgatgctcaaagaattaaacttcgtaatgaattacgtgttcactcctgagacttggtattcatttttcgtccgaggacgttaagaatccatgtcactttgagtgcccacacagattgtctgataaattgttaaagagcagttgcgacgcgctttagcgctctgtcgcgaggtcccgtataatacgttttcctcattcagagtcaagcgcttattttgcttttctctgtcggctttcaacgtcgatttccgtcgctgaatcctcctggcccggcggcttgtttgccgttgttccgtgtcagtggaggcgcattatagggggtaattctgaagtgacaaggataaattcaaaaaaagaattcaaccgctcacttttcaaccaaatcaggtattgagttttaattcttgcctggtttttaaacaaaaacgagcccgctgggctcgtttttgtcgttttgtgatttactgcactgccacaatgcggtcgtcttttactaccagctcgatggttttacccggaaccagctcaccggaaaggatctgctgggctaacgggttctcaatctgctgctgaatagcacgtttcaatggccgcgcgccgtataccggatcgtaaccgttggcgctcagcagcttcagcgcctcatcggacatctgcacttcatatccgcgctcttccagacgtttatacagacgctgcagctggatctgggcaatagaggcaatatgtttctcgcccagcggatggaagaccaccacttcgtcgatacggttgatgaactccggacggaagttctggctgactacccccagcaccaggtccttcatatgtccgtagtccagctcgccgaaccgttcctgaatcagatcggaaccgaggttcgaggtcatgatgactaccgtattacggaagtcgaccgttctcccctgcccgtcggtgagacgcccgtcgtcgagtacctgcagcagaatgttgaacacatccgggtgcgctttttccacttcatccagcaggatgacggaataaggacgacggcgcaccgcctcggtcaggtaaccgccctcttcatagccgacgtatcccggaggcgcaccgaccagacgcgagacggaatgtttctccataaactcggacatatcgatacgcaccattgcgtcgtcgctgtcgaacataaagttagccagcgttttacacagctcggttttaccgaccccggttggaccgaggaacaggaacgaaccaatcggccggttcggatcggacagcccggcgcggctgcggcgaatggcgttggataccgcttcaaccgcctcatcctggccaatcacccgatgatgcagctcctgctccatacgcagcagtttgtcacgctcgctttccatcatgcgggagaccgggataccggtccagcgagccagcacttcggcgatttcagcatccgtcactttattacgcagcagacgcatggttttcccttcggactgagtggcagccgccagctgtttctccagttccggaattttgccatactgcagctcggacatccgcgccagatcgccgacgcggcgcgcctgttcgatggcgattttcgcctgctccagctcagctttgatggtctgggtgccggagagcgacgctttttccgctttccactcttcttccagcaccgagtactgccgttctttatccgccagctcctcgttgagcatatcgagacgcttcaggctcgcctcatcagactctttcttcagcgcctgctgttccagtttcagctggataatacgccgatcgagacggtccagctcttccggtttggagtcaatctgcatacggatgctggatgccgcctcatcgatgaggtcgatggctttatccggcagctgacggtcggcaatatagcgatgcgataaggtcgccgccgccacgatagccgggtcagtgatctgcacgtggtggtgcagctcataacgttctttcagaccgcgcagaatcgcgatggtatcttctaccgaaggctcggcaacgaacactttctggaagcgacgttccagcgcggcgtctttttcgatgtactgacggtattcatcaagcgtcgtcgccccgacgcagtgcagttcaccacgcgccagcgccggcttcagcatgttacccgcatccatcgcgccgtcggctttaccagcgccaaccatggtatgcagttcgtcgataaacagaatgacgttgccttcctgtttggacaggtcggtcagcacgcctttcagacgctcttcaaactcaccgcggtatttcgccccggccaccagcgcccccatatccagcgccaatacccgacggcctttcagcccttctggtacttcgccgttgacgatacgctgcgccaggccttcgacgattgccgttttacccaccccgggttcaccgatcagcaccgggttgtttttggtacgacgctgcagtacctgaatggtacggcgaatctcttcatcacggccgatcaccggatccagcttgccctgctcggctcgctcggtcagatcgacggtaaatttcttcaatgcctgacgttggtcttcggcaccctgatcgttcacgctttcacctccgcgcatttgttcaatcgcctgagtcacgttggcggttgttgctccggcggattttaaaaggtcggtcagcgtaccgcgcgattcaagcgccgccagaacgaacagttccgacgaaataaagttgtcctttttcttttgcgccagcttgtcgcaaaggttgaggatccgcactaaatcctgagaaggttgcacatcgccgccggtgccttccacctgcggtaaacggctcaaggcctgttcgatgtcagtgcgcagtttcccggcattcacgcccgccgaggttaataaaggacgtaccgatcccccttcctgattcagcaaggcgctcattaaatgaagaggttcgatgaattggttgtcgtgcccgagtgcgagcgactgggcatcggcaagagcaagctggaatttattggtaagacgatccagacgcataactcctcccataaacaggtcaaatttgctactggagattaaatgaggtcatccctcaattattcaaggttaaagacccgaactatgtgaaaaataagtttgccttctggatcgtcttgattctctaggttatatcagccaaatgaaacttgccatacgaccggtggtcttgtcgcgccggtaagagaaaaaatcatccttttcgcttagcgtgcagcgatcgccgccgaaaatcagctcaacgccgacgtttgccagacgctgccgcgccagttggtagatatcagcaaaatatttttcgcctgccggacgaaaagcccggtgcgcattctcgtccttcgccataaaggcatcccggacttccggtcccacctcaaacgcctgcggaccgatggcgggccccagccacgccataatattttcggctttatcggcgaaacgagcaatcgtcgcttccagaaccccttcgcataagccgcgccatcccgcgtgcgccgcggcgacttcggtgccatcgcggttacagaacagcaccggcaggcagtcagcggtcatcaccgcgcagacggtccctggcgtacgactataagaggcatccgcgcgtttcgacggatagggtccgccgtccagcgtcagaacctcggtgccatggacctgctccagccaaaccgggtaagacggcaagccgccggcggcaaacatccgccgccggttttcttcgacatcctgcagattgtcgccgcaatgggcgcccaggttgagcgagtcatagggcggcagactcacgccgccgatgcgggtagaactacaggccgccacgctgccgggcattggccactgcggtacaatcagtttcgtcataaccagtcaatatcgtccttatgggcttcaaaatcggcgcgcatcgcctcgatgagctcgaccatatcctgtgggatgggcgcgtgccactccatttcaatgccggagatcgggtgatacaggcgcagcatggtggcatgcagcgcctggcggtcgaatttacgcagcgcggtgatgaactcctccgacgcgcccttcggcggacgcggccggccgccatagacctggtcgcccaccagcggatgggtgatatgcgacatatgcacgcggatctgatgcgtacgaccggtttccagacgcagacgcaggcgggtatggatgcggaaatgttccataatgcggtagtgggtcaccgccggtttgcccatcggatgcaccgccatatgggtacgcttggtcgggtgacggctgatcggctcttccactgtgccaccggcggtcatatgaccgatcgccaccgcttcgtattcacgggtgatctcgcgcaactgcagcgactccaccagccgggtttgcgccggaatggttttcgccaccaccatcagaccggtggtgtctttatccagacgatgaacaatacccgcgcgcggcacatcggcaattggcggatagtagtgcagcagcgcattcagcacagtaccgtcagggttgcccgcgccaggatgtacaaccagatcgcgcggtttattgatcacgatgatgtcatcatcttcgtaaacgatattgagcggaatatcctgcggctggaagcgcgcctcttcttcgatttccacatcgatagcgatgcgttctccccccagcactttttctttcggtttatcgccaatggtgccattgactaatacgcgttggtcgaggatccattcttttatccgcgatcgcgaataatcagggaacaattcggccaaagcctgatctaagcgttgaccgagttgattttcggtcaccgttgcggtgagttgtactcgttgtgccatatacagcttcttcgtttaacgttgggttttacggctttgccgtttaatatagtgtgctattgtagctggtcttaatcgggagcaggaacagagattctcccgcataaacattttgaggaagtcaaaacgtcatgacgcgcatgaaatacctggtggcagccgccacactgagcctggctttggtgggttgctccggctctaaggaagaggtgcctgataatccgccgaatgaaatctacgcgaccgcccagcaaaaactgcaggacggtaactggaaacaggcgataacgcaactggaagcgttggataatcgttatccattcggcccttattcccaacaggtacagctggatctgatttatgcgtattataaaaacgccgatcttcctctggctcaggcggctatcgatcgcttcatgcgtttgaaccccacccatccgaacatcgactatgtcatctatatgcgcggcctgaccaacatggccctggatgacagcgcgctgcagggcttcttcggcgttgatcgctccgaccgcgatccgcagcacgcgcgcgatgccttcaatgacttctccaaactggtgcgtggttatccgaacagccagtacgccactgacgcctataaacgcatggtgttcctgaaagatcgtctggccaaatatgagctgtcggtcgtggattactacaccgatcgtggcgcatgggttgccgtggttaaccgtgtggaagggatgatgcgtaattatccggatacccaggccacccgcgatgccctgccgaagatggaaaacgcctatcgtcagatgcaaatgaacgctcaggcggacaaagtcgcgaagattatcgccgcgaacagcaagaacacctgagcctgactcatcgatcgcaaacggcagccactggctgccgtttttttatacgtttcccgacgagctgaagcggtttagcgccgggttaactcatcaaatatggcctgctttatcgggttcgacaagtaaaatctcacttcttcctgccctgtctcacaaaatgaatttgttgacaaaaagtgacaataaaatgtgatttatatcacacattttgacattgggaaaggtatgctggattcaccaagacgggaaagacaagaggtaaaatttatgacaatgaacattaccagtaaacaaatggaaattactccggcaatccgccagcatgtcgcagaccgtctcgccaaactggataagtggcaaactcatttaatcaacccgcacatcattctgtctaaggagccgcagggttttatcgctgatgcaaccatcaacacgccaaacggccatctggttgccagtgcgcgtcatgaagatatgtacgccgccattaacgaattgatcaacaagctggaacggcagctcaataaagtgcaacacaaaggggaagcccgccgcgccgcgacgtcggtgaaagaggcaggctttgtggaagaagaagagtaatccttaacttaagttgtgtcatgccacgcgccttcgggcgcgttttttattgacagagtgaaaacagtacaggtactgtaatccccactacctaaaggaatttaccatgaaacttgtcccgttcttcttcgcattcttttttaccttcccctgaccgggaggcaattcgtcgtataagaaagaatgcgaagacgaacaataaggcctcccacccgggaggccttttttatttgataacaacaaaggcaacatctatgaccgaggaaaacccattactggcgctgcgcgataagataagcgccctggacgagaagctgcttgctctgctggcggagcgccgcggactggctgttgaggttggaaaagccaaactggcctcccatcgtccggtgcgtgatattgaccgcgaacgcgatctgctggagcgcctgatgactatcggcaagcgccataatctggatgcgcactatatcacccgcctgttccagctgattatcgaagactctgttcttacccagcaaaccctgctgcagcagcatctgaataaaattaacccgcattcggcccgcgtggcgttcctcggtcccaagggctcttactcgcatctggcggcgcgtcagtacgccgctcgccactttgagcagtttattgagagcggctgcgcgaagttcgccgatatttttaatcaggtagaaaccggccaggccgattacgcggtggtgccgattgaaaacaccagctccggcgggatcaacgacgtctacgatctgctgcagcacaccagcctgtcgatcgttggcgagctgacgatccctatcgatcattgcgtactggtgagcacctcgacggatgccgataaaattcagaccgtttacagccatccgcagccgttccagcagtgcagccagtacctgagccgctacccgcactggaagattgagtataccgagagcacctcggcggcaatggaaaaagtggcgcaggcgaactccccggccgtcgcggccctgggtagcgaagcgggcggcgctctgtatggtctgcaggtgctggagcactgccaggccaaccagacgcagaacatcacgcgcttcctcgtcctggcgcgcaaagcggtgaacgtctccgaccaggtgccggccaagaccacgctgttaatggcgaccggtcagcaggcgggcgccctggtggaagccctgctggtgctgcgcaaccacaatctgatcatgaccaaactggaatcccgcccgatccacggcaatccctgggaagagatgttttatctcgatattcaggccaacctggattcgctgcccatgcgcaaggcgctgaaggagctggcggatatcacccgctccatgaaggtcctcggctgctaccctagcgaaaacgtggtcccggtggatccggtttaacattcgcggaacggtaatttcttcatccctgccaccgctaccggcagggtgaagatggcgcctgacagcggatactgcgccagctcatcgtcctccatgttttcccgggtggtggtgatatagagcgttttcatatccgccccgccgaagcagaccatcgtcgggcaacgaaccggcatcgggtaggatcccagctcctcgccctgcggcgagaaacgggcgatccgccagccgtcgaacattgcgctccagtaacatccctccacgtcgatcgccgccccgtcagggatcccttcgccaggctgaaaacggcgaaagacttcgcgtcggccaggctcaccctgctcatccagcggcgtacggtagatcacggcgttcggcgtatcagaggtatacatccagcgccggtcggcgctaaaggccaggccattggcgccatggatgtcacactggatcactttcggctgcaggtcgttatccactcgcatcagcagcgcgccgttgtaatccccaggcccccagaaggtaccggcataaaagcgcccatcgcgatcggtcccgccgtcgttaaaccgcgccagctccgggttgctcgggttatcgcagactttccgccgcagcaggccgtgggcgtcggtcagccagatgccgctgcgcaatgcaacgataaacccgcccttctcgcgcagggcaaaacagccgacctcctctggaaactgcagcacctggtgttctccgctgcggatatcgtagcggtgaatttcacattccatgatatcagcccagtagagggcctgttctgcctcgctccaggtcgggcattccggcaggtatccggtgtagtcaaacagcggttgtggttcagccatcgttgtcatccctataaaaaaagccagcggtcgctggctttattgtatacatctttttcgctttactgccgattatcgttcgcctgacgcagcagcgtgcggctctcgctctggaaacgctgagcgtaatcgccaaaccagtgttcgactttacggaagctgtcgataaacgcctgcttatcgccctgctccagcaggccgatcgcttcgccgaaacgctggtagtagcgcttaatcagcgccaggttgttttccgatgacataataatatcggcgtacagctgcggatcctgggcaaacagacggcctaccatcgccagctccagtcggtaaatgggtgacgagagcgccagcagttgctcaagacgtacattctcttccgccaggtgcaggccataggcgaaggtggcaaagtggcgcagcgcctgaataaaggccatgttctgatcgtgctcaacggcgctgatgcggtgcagccgcgcgccccaaacctggatttgttcgaggaaccactgataggcctccggctggcggccatcacaatagaccaccacctgcttcgccaggctgccgctgtccggaccgaacatcgggtgcaggccaagaaccgggccctgatgcgccgccagcatcgcctgcagcggctccgctttcaccgaggcaaggtcaaccagaatgcaatccgccggaaggggcggcagcctgccgatcgtctccacggtggtgtgaatcggtacgctgacgataaccatgccggcatcggcgacgatatccgccgcccgggcccaatcgtttttttccagaatacgcacctggtagccggacagcgttaacatcttctcaaacagacgccccatctgcccaccgccgccgacgatcaccaccggccgcagattcggctgcagggttttgaagcctttgtcgttttcgctggaataggattcccgcatcacgcgacgcagaacgtcctcgatcagatccggtggtacgccgagcgcagccgcctcttcacgtcgggaggcgagcatcgccgactcgcgctccgggacgtaaatcggcaggccatactggctcttcacctcgccgacttcggccaccagctccagacgcttagccagcaggctaagcaacgctttatccacttcatcaatttgatcgcgtaacgcggtcagttcagcaaccatactttcctcttaaaccaaacgggccgccaggtggccgcggagatccttatccagttcacgcagcagcgcctcggtagtctcccagctgatgcaggcatccgtcaccgagacgccgtatttcatcgcctcacgcggctgttcagaggactgattgccttcgtggatattactttcgatcatcaggccgataatggagcggttgccatctttgatctgcgcgaccacggattcagccacggccggctggcggcggaaatctttattggagttcccatgactgcaatctaccatcagcgacggcttcagtcccgcctgcgccatctctttttcgcatttcgccacatcttccggaccgtagttcggcgctttgccgccgcggaggatcacatggccgttcggattaccctgcgtttgcagcaggcagacctgcccggcctggttgatgcctacgaaacggtgcggcatcgccgcggcgcgcatggcgttgatggccgtggccaggctaccgtcggtaccgtttttaaagccgaccggcatcgacaggccagaggccatttcgcggtgcgtttgtgattccgtggtacgcgcgccgatagcggaccagctgaacagatccccgaggtactgcgggctgttgggatccagcgcttccgtcgccagcggcagtcccatattgacgagctcgaccagcagacgacgcgcaatcttcaggccgccttcaacatcaaacgaaccatccatgtgcggatcgttaatcagccccttccatccgacggtggtacggggtttttcaaaatagacgcgcatcaccaggtagaggctatcgctgacctctgcggcaagggctttaaaccgacgagcatattcaatcgcagcttccggatcgtgaatggagcaaggaccacataccaccagcaggcgcggatcgcgaccggcgatgatatccgaaatggtctgacgggcgtgcgcgatctgcgcttcctgctcgacgctcagcgggaattccgccttcagttgctccggggtcattaatacatgttcgtcggtaatatgtacgttgttcagcgcgtctttttgcatgattgcgatcctgtgtagctcgtttgcgataagggttgcctcagagggcatgacgtaacgataccacacaaagtaaagaattcaatccatattccgtaaattttaatttacaccaacgaattaattgccactcacaatggcgcgatgcgtataacaatatttacacatagaaaaaacaagccaaacttgcgcacccacggtatcggtactacgaaaaatcctggtgagaattgtcccaaagcaaagggcgcatctaatgacgggttttattaacagtggtattcttcgccgggcatcggcagcggcttttcccgcgctatggcgactttgacggaagcgttaatgacagtattacaccgtcttttattgactgtattttttctcatcgcggtatctcctgtttttgctgccggaccttcagaacatgttcgcgctattgtttccgggatcgtgacctacacccgttggccgtcattaacaggagcgccaaagctgtgcatttttgcctcatcacgcttcacccatagcctggctcatgaagatccggatgcattaccctatcaaccggtgatagtacgtaatcgtgaagaagcgttaaaaacgacctgcgatggtttttattttggcagcgaatcgccgactgaacagtcagaactcactcgccgctatggcccgaggccgctgttactcatcgcagaacaaaatacggattgttcaattggtagcgcgttttgcctgatcatcaatgacgaccgggtccgcttctccgttaatctggacgttctgacgcacagcggggttcgggttaacccggacgtcctgatgcttgcccggaagaaaccacatgaataaggacttttcacagactccgcgcccgactttcaaacgcgcgctccgtcgcattagcgtgataagcgtggtgatttccatgacgctggtctggctgctgctgagtacagcctcaatcttcacgctcaagcagtacgcgcagaaaaatcttgagctcactgccgcgaccatggggcgcagcctcgaagccgccctggtgtttggcgacagcgcggcggcagaggagaccctcgcgtcgttgggcaagcaagggcagatctcccaggcaatcgtgctaaacggccagatgcagcacttcgccgcgtggcgccatgaaccgctggccaataaagagcaagtgagcgggcttatcagtaaatggctgtttccggagcccacggtgcagcccatctggcaccagggcaaacaaatcggcgagctgagattgaccgcgcttgatgaactgattagccactttctcggtatctcgattctggtgctgaccggcagcattctgctcgcctcgttcatcgccctgctgctgacccactccctacaccgggggatcgtcgccgccctgcagagcatcactgaggtcgtgcatgatatacgtgaaaaccgccacttctcccggcgggtgccggaggagcgtatcgaggagttccatcttttcgcccaggactttaacagcctgctgggggaaatggaggactggcagcgccagctgcaggccaaaaacgcgcagctgttgcgcagttcgttacacgatccgttgaccggcctggctaaccgcgccgcctttcgtaacgcgctcgccgagctgatgcagaatgaagtcgatcatcaaacctcggcattgctgtttcttgatggcgataatttcaaactgattaacgacaactgggggcatgcggcgggcgataaagtgctgatggaggtcgccagccgcctgatgacttttgccggtaaacgccatctggcgtggcgtcttggcggcgatgagtttgccgttctgctgcgcgaggtgcgctcggaagcagaagtgcaggccctgtgccaggcgctaacggaacaatttcttccgccattcaacctgcacaacggtcatagcgccacgctctcgctgagcgtcggttatgccctggcgtgggagcacgccaccgcggaatcactgcaagaacttgccgatcagaatatgtatcggatgaaaaaccaacgtatccagcagacgctgaaataataaaggactcattatgatcagaaaatatttcgtccccgccctgatggcggcggcgcttttgacaggttgccaggctcctcagggaaaatttacccccgagcaggtggcggcgatgaaatcttacggctttactgaaagcaatggcgattggtccctgggcttatccgatagcatcctgtttgacaagaatgactaccgactacgtcccgacagccgccagcagatcaccacgatggcctcgcggctggcggctaccgggatcacccatagccgccttgaaggccataccgataattatggtgaagatagctacaatgaagccctgtcgcttaagcgggccaacagcgtggccgatgcctgggcggaaggcgctcatgtcccacgcagtaatttagtcacccgcggccttggcaaaaaatacccgatcgccagcaacgacacggcggccgggcgcgccgaaaaccgccgggtaacggtggtcatcagcacgccgtaagtcttcacttagtcgctggacttcatcatcctcattgccgttgccgcgcgccagcgcaggtagtcaacggcaatgaacagcagcaggctggctcccattaacggcatggccaatccaagggtaaacgccagcccaagcaccaggcttcgggcaggccaggcgagcgacagccacgcctgcagcagcgaacgcgccggatcccaggccgcctgaggcggacggcggatccaccataaccggtaccccaccccgatggtaacgcacagcgcgcagccaaatcccaccagcagcagctgattcgccagaccaaagaggatccccatatggaaatcgacgccccagcgggtgagcttcgccatcagcggaaagtcggcaaaacgcgtgcgatccaccacctgcatcgtggcgccatcgatcgccaccgcgtccacctgcgtcggccagcgacggtcgatctcattcaccgtccaggcgcggtcgtctgacactggcggacggatctccagccggctggcgttcagccccgcctgacgggccgccgccagcgcctggtcaaactgggccagctgcagcgccggctgatgctgggccatggccatcgcatccatatgatgtccggcgtggggatcgtgcgtcatctgcatctcgccatgcagctgggtattgacctgcggcgtcagccagccgaacgctgcccgcattttgtccacattgccgccggcccattgcgaccaggtcaggccggtggcggagaagagcagcatacccaccagtaagccccagcccagcgtcacgtgcagccgacgatggttctgcagggcgttattcagccgccgttttggacgcgtcatcgcccacagggcaatgcctccgagcgcggccacccacatccaggaggcggccagttcgctgtataacctcccgctgtcgcccagcagcagagagcgatgcgcataatcaatccactggcgcagcggcaggatgccgctggtgccgtagaccgtcatatcgcccttcacccgcagcgcgatcggatcgacaaaaatagcccgggattccgactctccgagacccggatcggcaaacataatgcgcgtggtctcgcccaacgcaggcgccggacgcaccgccagcagccgcagattgccctgggtcgcttcttcggccaccgcaatctgggcgctgagcggctgcggagtcccctcggcaaggccatgcagcgcgtcgtgatagagccagttttccagctgcggcgtcgccacgtacaacgtaccggtcagggcagcgacaaagataaacggtccgataaacagaccaatatagaaatggaggcgacgcagcaggttcagccatgccgcgcgcgaggtgcaggttgtcatacttttccttttttaaagcaaaagaggtcgttgcgcggtgcgcagattgatttttattaaagggaaaaagcagacagccgcggcggggcgcgggtttcggggtagagccagggaaagtagtgccagtgctttaataccgggcgagaaaccggcaggcgaatgcgccgcaggagcatggcgacgaacagcgccagcgcgaaaaggagccccgggacatgggctaacagcacgcaatagccacacgcttcggcatggtccagcggcatttcgtgtccggtatgcgtagcgccgtctgtgctgtgcatcattgccatcttgtgcccgggcatctgcgccatgctcgcggacgagctatccatcatcatggcgtggtgcatgccgggcatggcgctcatggggtctttttgcagggagacggagatcaggggggccaccaggatcagcaggatcgccaacagcgccagccaggcggctcgccgtttaggtgtcgtttgctgaaaactgttactgaccaccgcccctccgtatagagggcgtattgtaaatgatttacatcacgatggttacaacaaagataaaaaaagggccggccctgaggccagccctttttgtcaggatgtcgcgaaagcgaatcttagttaagacgctctttgatacgagcagacttaccagtgcgctcacgcaggtagtacagtttagctttacgtacagcaccacgacgtttaacagcaatgctgtcaactaccggagagtgagtctggaagacacgctcaacgccttcgccgttggaaattttgcgaacagtgaatgcagagtgcagaccgcggttacgaatagcgataaccacgccctcgaatgcctgcagacgttttttggaaccttcaacaacccatactttcacttccacggtatcacccggacggaaggaaggtacgtcctgcttcatctgttcttgttcaagttgcttaataatgttgctcataatttaatctcttatcctgggtaaactgatattgggggctcacgcctgcccatcatgtttatgctgctgttgcgcgtgttcagttttgaactccgacagcagctttgcttgctcttcagtcagagccaggttttccagaagttcaggtcttctaagccaggtgcggcccagcgactgcttcagacgccagcgacgtatctcagcatggtttcccgacagcaatactggcggtacttccatctcctctaacacttcaggacgggtatagtgggggcaatccagcaacccatcagcaaaggaatcttccgttgccgatgcttcatggcccagtactcccggaatgaaccgggaaacggagtcaatcagcgtcattgccggtaactcaccaccgctgagaacgtaatcgccgattgaccattcttcgtcaatttcggtttggattacgcgctcgtctatcccttcgtagcgaccgcacaccagaatcagtttctgattcgttgccagttcgctgacgcccgcttgatcaagcttgcgtccctgaggtgacagataaatcaccttcgcgccttcacctgccgcggcttttgctgcatgaatggcatcccgtaagggttgcaccatcattagcatccccggtccgccgccgtaaggacgatcgtccacggtacggtgccggtcatgcgtgaagtcgcgaggactccagctttcgatgctcagcaggccattttttactgcccggccagttaccccgtaatcggtaattgcgcggaacatttcaggaaacaggctaattatgccaatccacatagcgccgtcttttaccgtttatccggagaatttaaaaaccaggatcccaatctacttcgatagtacgcgtagtgagatcgactttcttgataacctgcccatcgaggaacggaaccaaccgctccttgataccaaatgcatctttcaggtttgccttgatgacgagcacgtcattcgacccggtttccatcatatcgatgactttaccgaggctatagccttccgtcgtaactacctggcagcccatcaggtctttccagtagtagtcaccctcttccagctccggcaactgcgatgaatccacgataatttcgcaattagtcagtagattcgcggcatcacgatcgtcaacgcctttcagcttgatgatgatgtcctgattgtggtggcgccagctttccagctcaacgacctgccactgacccgccttctggattaaccagggctgatagtcaaaaatgctttcggcgtcttcggtggaggaaaacactctgagccaaccacggataccgtaggaagaacccattttccccaatacgatcggatcaacaggtgcttgcgcggtgtgttgcttgctcatcatgaccaccgtgacagattaagctgctttgttagcggctttgatcagcgcggcaacgcgatcggaaacagtagcgccctggccaacccagtgagcgatacgatccagatccaggcgagtttcttcttccgcaccgttagcgatcgggttgaagaaaccaacgcgctcgatgaagcgaccgttgcgtgcattacggctgtcggtgacaacaacctggtagaacggacgctttttagcgccgtgacgtgctaaacgaatagttaccataacatcctcttgtgtgaataaaacaaccgggccccatcgaggaacggagcccggtgtcatattaaaagcccgaaaattttactgatttctggggaaaatgcaatcagcagttgataagtctgctgtaaaaggccgtcggcggtgcagccagtttagtaccagcgtgtgcgcaaccactgtaacgtacaggtagtacgtgaggatggcgagcacaccccggcgctaaaatggcaaacaagataaccttatgcccttgtttttaacgacccgggaagcctggcggcatcatccctttcatcccgcgcatcatcttcatcatgccgcctttcgacttcatcttcttcatcatgcgctgcatgtcgtcgaactgcttgagcagacggttcacatcctgcacctgcatgccgcagccggcggcgatacggcgcttacgcgaacctttgatgatttccggcttagcgcgctctttcagggtcatcgagttgatgatcgcttccatacgcaccagcactttgtcgtccatctgcgctttcacgttgtccgggatctgccccatgcccggcagcttgcccatcaggctggccatgccgcccatgtttttcatctggcgcagctgctcaaggaagtcggtgaggtcgaaaccgtcgcctttcttcagcttggaggccagcttctcggcctgcgcgcggtcaaccttgctctcgatatcttcgatcagcgacagcacgtcgcccatgccgaggatacgggaagcgacgcggtccggatggaacggctccagcgcttcggttttctcgccgacgccgaggaatttaatcggcttgccggtaatatggcgaatcgacagcgccgcgccgccgcgggcgtcgccgtccactttagtcagcaccacgccggtcagcggcagcgcttcgttaaaggccttcgcggtattcgccgcatcctgaccggtcatcgcatcgacgacgaacagggtttcaaccgggttaatggcggcgtggacgtgcttgatttcgtccatcatcgcttcgtcaacgtgcagacgaccggcggtatccaccagcagcacgtcgtagaatttgagtttcgcttctttcagcgccgcgttgacgatatcaaccggcttctgcccaacatcagacgggaagaaatcgacgccgacctgctcggccagggtttccagctgtttgatcgccgccgggcggtaaacgtccgcggaaacgaccagcactttcttcttgtgcttctcgcgcaggaatttccccagcttaccgacgctggtggttttaccagcaccttgcaggccagccatcagcaccacggccggcggctgcgcggccaggtcgagcgtctggttctcttcgcccatcgccgccaccagctcgttgcggacgattttgacgaactcctgacccggggtcaggcttttattgacttcatggccgaccgcgctctctttgacgcggctgatgaaatcacggaccaccggaagcgcaacgtccgcttccagcagcgccatgcgcacttcgcgcagggtgtctttaatattgtcttctgtaaggcgtccgcggccgctaatgttgcgcagcgtacgcgacaaacgatcggttaaattatcaaacattgtctctcgcctgaggtggaaacggtcggtcgccgcagcgacacacaaaacgaatgtggcggagtataacacgacatcaatctgaatgtgctgcaacggttggagcagaggcctgctaacgttatactgcttctctttcttatttagccaacagccgacacctatgcctgtttttgctctactcgcccttgtcgcctactccgtcagcctcgcgctgattatccccggcttgctgcaaaaaaacagcagctggcggcgaatggcgattttatctgcgactatcgccttaatctgccatgcttttgcgctggaagcacggatattccccggcggcgagagcgggcaaaatctcagcttactgaacgtcgggtcgctggtcagcctgatgatctgtacggtgatgactatcgtggcctcgcgcaatcgcggctggctgctgctgcctatcgtctatgccttcgcgctgatcaacctggccttcgccacattcgtgcctaacgaatatatcacccacctggaaaccaccccggggatgctggtgcatatcggcctgtcgctcttctcgtacgccacgctgatcattgccgcgctgtatgcgttgcagctggcgtggatcgactaccagctcaagaataaaaagctggccttcagcagcgaaatgccgccgctgatgagcattgagcgcaaaatgttccacatcacccaggtcggcgtggtgctgctgaccctgacgctgtgcagcggcctgttctacatgcacaatctgttcagcagcgaaaatatcgataaagcggtgctgtcgattattgcgtggttcgtctatatcgtcctgctgtgggggcactatcatgaagggtggcgcggacgtcgtgtggtctggttcagcgtcgctggcgccggtctgctgacgctggcctattttggtagccgcgtgctgcagcagttcgtgagctaagtcttttaaggaatcctacgtggaacatatctccaccaccacgctgatcataacgctgatcgtcatggtgattatctctgcctatttctccggttccgaaaccggcatgatgacgctgaaccgctaccggttgcgccacatggcgaaacaaggcaaccgccccgccaagcgcgtggagaagctgctgcgcaagccggaccgcctgattagccttgtgctgatcggcaataaccttgtcaacattctcgcctcggcgctgggcaccatcgtcggcatgcgcctgtacggcgacgccggcgtcgcgatcgccaccggcgtacttacctttgtggtgctggtatttgccgaagtgctgccgaagaccatcgccgccctctatccggaaaaggtcgcctaccccagcagcttcctgttggcgcccctgcaggtgctgatgatgccgctggtgtggctgctgaataccatcacccgcatactgatgcgcatgatgggcatccgcaccgataccgtcatcagcagcgccctgagcaaagatgaactgcgcacgattgtgaatgaatcccgttcacaaatctcacgacgcaatcaggatatgctgctgtcggtgctggacctggagaaggtcagcgttaacgacatcatggtgccgcgcaatgagattgtcggcatcgacatcaatgatgactggaaatctatcgtccgccagctgacccactccccgcatggccgcatcgtgctctaccgcgattcgctggacgatgccatcagcatgctgcgcgttcgcgaagcctaccgtctgatgacggagaagaaagagttcacaaaagagatcatgctgcgggcggcagatgagatctactttgtgccggaaggcacgccgctcagcacccagctggtgaaatttcagcgcaataaaaagaaagtcggtctggtggtcgatgaatacggcgatattcaggggctggtcaccgtcgaagatattcttgaagagattgtcggcgacttcaccacctccatgtcacccaccctggcggaggaagtgaccccgcttaacgacggcacggtgattatcgacggcagcgccaacgttcgcgaaatcaacaaagcgtttaactggcacctgccggaagatgaagcgcgcaccgtcaacggtattatcctcgaagcgctggaagagatcccggtcccgggcacccgcgtgcgcattgagcagtacgatatagatatcctcgacgtgcaggacaacatgatcaaacaggtgaaagtgatgccggtgaaatcattacgcgagagcgtcgcggagtagcgcgagcgaaggaattaatatcacggtgggctgcggcccgccgtttttttatctcgcgccagcagcgatgacacaaaaaacggccgcccgcaggcagccgttgagcaaggcagcaagcgttatttcgctttcgctaccgtcaccatcgcggcgcgaatagtacggccgttcagggtataacctttctgcatcacggccagcacgttgcccgccgccacatcttcagactcgaccatcgcaatggcctggtggacgttcggatccagcggaacgttggtgtcggcgatcacttccacgccgaacttacgcactacgtccagcatagatttcagggtcagttcgatcccctccaccatcggcgccagctccgggttagccttgtcagccacttccagcgcgcggtccaggctgtcgatcaccggcagcagttcattgacgaatttttccagcgcgaatttgtgcgctttctcgatatcctgctcggtacgacgacgcaggttatcttcgtcggctttggcacgcagcatcacttcacgttcacgtttctgcgcttcagccagctgggcttccagattcgcaattttttcatcgcgcggatccacctgctcagccgaaacttcaggctctaccgcctcaacgtcgtcgtgctgctccgtgataatttcttccggggcttgcccctcaggcgttttctgttctttactactcatgaatttctccgcgtttttttcgcattcatctcgctaacttcgcttattatggggatcagtttccgggtttcaagggaagcggacagattgtcactatttcatttaacgcaaggacatccagatcatgaagaaccatttcaagtgtatcggcattgtgggacatcctcgtcaccccaccgccctgaccacacatgaaatgctctggcgctggctgtgcagcaaagggtatgaagtgctggttgaacagcagatcgcccatgaacttcagctcagcaacgtgaaaaccggcacgctggcggagattggccaacaggccgatctcgcggtggtggtgggcggcgacggcaatatgctcggcgcggcgcggaccctggcccgttacgacattaacgtcatcggcattaaccgcggcaacctcggctttctcaccgaccttgacccggacaacgccctgcagcagctcgccgacgtgctggaaggccactacatcgccgagaaacgctttctgctggaggcccaggtgtgtcagcaggattgccagaaacgtatcagcaccgccatcaacgaagtggtgctgcaccccggcaaagtggcgcatatgattgagttcgaagtctatatcgacgaagtctttgcgttctctcagcgatccgatggcctgattatctccactccgaccggctccaccgcctattcgctgtcggccggcggcccaatccttacgccgtcgctggacgccatcaccctggtgccgatgttcccgcacaccctttcagcgcgaccgctggtgatcaacggcgacagcaccatccgcctgcgcttctctcaccgctgcagcgatctggagatcagctgcgacagccagattgccctgccgatccaggatggcgaagatgtcctcattcgccgctgtgattatcacctcaatctgattcaccctaaagattacagctatttcaatacattaagcaccaagctcggctggtcgaaaaaattgttctgattttcacggctgcctctttactggataaaaaaccagtctatactgtacgaaaacacagtattggtttttcatacaggaaggcagctatgttggcgcaactcaccatcagtaattttgctatcgttcgtgaactggaaattgatttccacagcggcatgaccgccatcaccggggaaaccggcgccgggaaatccattgccatcgacgcgctggggctgtgcctcggcggcagagcggaagccgacatggtgcgtcgcggcgccacccgtgccgacctgtgcgcgcgcttcgcgctgaaagatacccctgccgcccagcgctggctggaagagaatcagctggagagcgggcgtgagtgtttacttcgccgggtgatcagcgccgacggccgctcgcgcggcttcatcaacggcaccgccgtcccgctctcgcagctgcgcgagctgggccagctgctgatccagatccacggccagcatgcccaccagctgctgaccaaacccgaacaccaaaaaacgctgctcgacggctataccggtgagtatgcgcttactcagcgtatggccgagcactatcgccagtggcaccagagctgccgcgagttggcccagcatcagcagcagagccaggagcgcgccgcccgcgccgatctgctgcagtatcagcttaaagagctgaacgaatttaacccgctgccgggagaattcgagcagattgacgaagagtacaagcgcctggccaacagcggccagctgctcagcacctgccagcacgcccttacggtactggcggacggcgaagaggccaatctgcagagccagctttataccgcgaagcagctggtcagcgagctggtgggcatggacagcaagctttccggcgtcctggatatgctggaagaggcggccattcagctcagcgaggccagcgacgagttgcgccactaccatgaccgtctggatctcgatccgaaccgtctgtttgaacttgagcaacggatttcccgacaaatcgcgctggcgcgtaaacatcaggtgatgccggaagagctgccggcggtttatcaggcgatgctggaagagcagcgcctgctggacgacagcgccggctcgctggaatccctcagccagcaggtggtcgaacatcatcagctggcgctggagaccgcacgccagctgcatgccctgcgccaggccagcgccgacgagctgacccagcttatcaccgaaagtatgcactcactttcgatgccgcacggggtcttcgcgattgaggtcgcgttcgatgaacgccatctcaccgccgacggcgccgaccatattgagttccgcgtcaccactaaccccggtcagccgctgcagccaatcgccaaagtggcctccggcggcgaactgtcgcgcattgcgctggcgattcaagtgatcaccgcgcgtaaaatggaaaccccggcgctcatcttcgacgaagtggacgtcggcatcagcggcccgaccgccgccgtggtcggcaagctgctgcgccagctgggcgagtccacgcaggtgatgtgcgtgacccacctgccgcaggtcgcatgctgcggccaccatcatttctttgtctgcaaagagaccgatggcgagatgaccgaaacccatatgcagccgctggataaacgtgctcgcttgcaggagctggcccgtctgctgggcggcagcgaagtcacgcgcaacaccctggcgaacgcgaaagagttgcttgcggcgtaaactttttgattttcacagggtcatagtgaacagcaaattgcctgctgacctgcagccggaggtttccaacggcgcgaaggtctattattatcggcatattacagatgagccacgtactgctcgggcccaaaaaggaatcaaatcactatgcgctgtaaaacgctgactgctgccgcagcggttcttcttatgttgaccgcaggctgttccactctggaacgagtggtttaccgtcctgacatcaaccagggtaactatctggcaccaaacgatgtagcaaaaattcgtgtcggtatgacgcaacagcaggtagcttatgctctggggacgccaatgatgacggatccgttcggcaccaatacctggttctatgtcttccgtcaggagccgggccaccagaaagtgactcagcagaccctaaccctgaccttcaacagcggcggtgtgttgactaacattgataacaagcctgcgctgaccagtcagtaaggcccggaaaagcaaaaagcgctcgatgagcgcttttttatggctgatagtcggtctgctgcaggttactttgcggcgcttttctctgcccgctggcgacgcagctctttcgggtctgcgatcagcggacgatagatttccacccggtcgccgtcgtgaacttcgtcatgcagctttaccggacgactatagatacccagcttgtttttcgccagatcgatgtcatcacgcagcgccagcagaccgctggcgataatcgcctgctcgaccgtcgccccctcgtccagcgtgacccgctgcagatactgcttttcaggcagcgcgtaggcgacttcaacacgaatattagccggcactgtaaacctctttggcgcgcgaagtgaacgcctgcaccatgttagcggccagctctttgaagatccgaccaaaagccatctcaatcagtttattggtaaactcaaaatcgagatggaattctattttgcaggcctcggggctcagcggaataaacttccagccgccaatcagcttcttgaacgggccatccaccaggctcatcaaaatgctctggttgctggtcagtgtattgcgtgtggtgaaggtcttactgatgccggctttggacacatcaaccgccgccgtcatttgcgtcggcccgaattccagcacgcggctaccggtgcagcctggcagaaaatcaggataggacttcacatcgtttaccagttgatacatctgttccgcgctgaaaggcaccagcgcagtacggctaatctgaggcatagcaggttccacatttaaacacagtgcaaataatatcatttatctgctgctaaaaaaaacgctgtgccgcaactcgtgctaagatgcgcagtacacctcgcaggatgcgatcgaggtaactgtgtataagacgatgacttcaggacattatgactaagaaaaaagcccacaaacctggatcagccaccattgcgctgaataaacgcgcccgtcacgaatactttatcgaagatgaatacgaggctggtctcgccctgcagggctgggaagtcaaatccctgcgtgcaggcaaagccaacatcggcgatagctatgtcatcctgaaggatggcgaagccttcctgttcggcgccaactttacgcccatggccgtggcttccacccactatgtctgcgacccgacgcgcacccgtaagctgctgctcaaccagcgcgaactcgacacgctgtacggccgcattaaccgcgaaggttacaccgtcgtcgccctgtcgctgtactggaagaacgcctggtgcaaagtgaaaatcggcgtcgccaaaggtaagaaacagcacgacaagcgtaccgacctgaaagatcgtgaatgggcgctggataaggcgcgtattatgaagcacgccggacgttaatttcccctccccgagggccaactctcgctggcccttacgctatatccttgttgatgctgctttttcgtccatcctgctgaaataatcctgcgtgatggggctggtaacgacattcacaaatctgttatacttaacctacacattggggctgattctggattcgacgggatttgcgaaacccaaggtgcatgccgaggggcggttggcctcgtaaaaagccgcaaaaaatagtcgcaaacgacgaaaactacgctttagcagcttaataacctgctctgagccctctctccctagcttccgctcttaagacggggatcaaagagaggtcaaacccaaaagagatcgcgtggatgccctgcctggggttgaagcgttaaatctaatcaggctagtttgttagtggcgtgtctgtccgcagctggcaagcgaatgtaaagactgactaagcatgtagtgccgaggatgtaggaatttcggacgcgggttcaactcccgccagctccaccaaacattcattcatgatgcatcatgaaccttaaaaaagcctgtaacttcaacgagttgcaggcttttttgttgcatgtgtggtcatgatctctgtatgaatcttgagcattatgtatcttgttttgtaccgcgttgcctggacgctaaaaaaacaaggtgcaaaaacatgcctaaggtattgaaatccctaaccaataccgagatcgctgccgccaaaccgcagaagactgagtatatgctgcgcgatggcgacggactggcgttgttgattaagccatccggcagaaagatctggtacttcgaatacgctcccccggcgctgaaaaaacggaccaaaatcagcattggcccctacccggtagtcaccctcgccatggcgcgagatttcaggttgcaataccggcgtttacttgtgcagggcatcgacccgcaggcccatctggagcaggttgcagaggagcaacgactccagaatgaatgcacgctggaaaaagttgcggaacagtggctcaaagagaaaaaacggactagcgatcttagcgaagatcacgccaaagatgtctggcgctcgctggagatgcacgtcttcccctctttgggtaacacgcccgtcactgagatccgcccgaagatgctcaaggaacacctcacgctactggaagaacagggcatactggaaacgctgcggcgggtgatctcacggctcaatgaaatcttccgttttgccatctccgaagagctcatcgagttcaatccggctgacaacctggtcgcccgcttcaagaaaccgaaaaagcagaacatgcccgcccttcaccccagtgaactgggtaggctgatgctggccttacagaacgcttctatccgcaaggaaacccgctgccttatcgaatgggagctactgacctgggttcgccccggcgaagccgtcagcgcccgctggtgcgacatcgacatgaaaaaagcggaatggcgcatccccgacacctttatgaagatgaaccgttcgcacactgtgcctctcagcaaacaggcgctgcgcgttcttcagatcatggagcccgtcagccgccatcgtccgtgggtgttccccagcatccgcaaaccactggagcatatgcaccagcagaccgcgaacgccgcgcttattcgtatggggttcggcggtgagctggttgcccacggtatgcgcagtattgcccgaacggcgggagcaggtcatttcccccgtgaagttctggaatctgcgctggcacaccagaaagaagacgagatcgaagcggcctacaaccgcagcgactatctggaacaaaggcgaccgctgatgcagtggtggggaaactacgttgatgccgccagacggcaggcattgctcggtgaagaagaaccgctgcggatcgtggaaggagaataatgtgaccagtcccattcgtcagaatctgtttgaacgggaatgcgatatgccgctgctggaagcgcggcatctcgcccttctgcttctcggccttgatgcttcccaaccggcaaacgccctgccggaagaacatcaggagaattaccgtatcctacacgacgccatcagtcgcaccatcaaagccactggcatggtcagcgccccggcgaacaaacgcatgttctatgccgatgagatgttcgccctggcctggcggcttattgatgacgaactgacgccgccagaaattaaggcccgcagcctgaaggcggtgatgaaactgtcacgcaacagccgtggccgcaagtggctgaagacgctcggtgacgacgcgctaccagatctcactacttcagcacaaccttcccagcgtgggatgcataaacgcgacaaagcgcgggagaatactgccaggctctgctggctgctggttcagcttctggttgaggagactgacgggcgttatgggacgtctgataaaccggcttcggataggatacttcgaaagctgagagcgctagcgcaggagcgtgaattgccgtcagacgggcttgggcgagggacgttttatgaggtgttgaaaatgggacgagagaaggagaagtaggtatatacttcttgaacagggactgaaagttgaagaaggaaatcttaacttcttatactatgctgagattcacagaggaactttagaaatacttttctcttgtggggttcaacccatattagaagacatggatatcatcaaaaaattgaggggtagttgagtatggatccaatatcagttacaacagtatcaatttatgtcgcaacaaaatttattgatcagttcattgcagaagaaggttacggatggttaaaaaagaaattattccccaaaaacaactatgttaaccagctctatagaataattgaagaaacggctattgaattcgaaaaaaaattccccatcgatagtataaaaattccattttaccaatctcaactattgtttgaaacattgaatgagcatattttattcaaagaattaccagataaagattatttgttgcaaaaattcagtgaatatccaaatgtcatcccaccaactcaagaacaacttgaaactttctataaaatttttttactaaaaataaacaactgtaaagaattaaaaaaactccacattgaggagacttataaagataagatattcgatgtaagcaatgagatcattcagataaaacttttgctgcaatcatttgatgaaaaatttacttttcacttaaacgataattggttaaataataaaaatagagaagctatagctgatttaggaggacgttacacacccgaactaaatttaaaattagagatcgcagatatcttcgaagggcttgggaaaactaacaaattttccaaaatattttacgaacatatcgataatttcttgatcaaaggaaacaatcttcgaaactgcgatgaaatacgtgagcagttagctttgatttctaaagccttaacagacacctcaattctgtttctaaaaattgattttcacgaatccaaaagcattccaatcaataaatttaatgaatatatctcaaattgtcaaaaatacatttctgaggcggagtcgacactatggaaaatcgaggaaaaggaaaatccggataagacaacaagttttagcgataagtattcatcaattttgagagacttaagagaattttattatgagtgtgacactttatatatatttctcaattctataacggtaaaattatcgaataacccatttctgctccttgaaggagaagctgggattggtaagtctcatttgcttgctgatatcatcgaatcaagaattcaaacaggatatccatctctatttttattagggcagcaacttacaactgatgaatccccttgggtgcaaattttaaaaaggctacagctaaacactgtatcctcagaatttcttgaaaagctaaatctctatggtgaaaaacaagggaaaagattcctgatatttattgatgcaataaacgaagggaatggtaacattttttgggaagataacatcaatagcttcgttgatgaaataagaagttttaaatggcttggccttataatatcagtcagatcaacatataaagatattactatctcaaacgaacggatctctcgtaataattttgaaatttatgaacacttgggttttaagaataaagagatggaagctgttaacttattttatgataattataatatagaaagaccatcatcacctaatttaaatccagagtttaaaaaccctttatttcttaagttactatgcgaggggataaagaaaagtggtctgacaaaagtccctgtaggatttcatgggatttctaagatcttaagtttttttgttgaaggcgtaaataagtcactatcctctcacaaaagatataatttcgatcctagtttcccattagttagtgatgctctcaataaattaattaaagttaaactagctaatggcagaaatagtattgctcttaaggatgctcatacagctgtccagtctgttgttaaagactatgtgaacgataaaacatttctcagctctatgatagatgaaggaatactgaccaaaggtatcgttcgcaatgaagacaactctgttgaagaggtcgtttatatatcctttgaaagatttgatgatcatttaacagttaactatttattaaatggtgttgataacattgaagatgaatttaaaacaggaggttctcttcaaaaatacttcaatgatgaatacagtttttatcgcaatcaaggaatcattgaggctttatctattcaatcaccagaaaaatatggaaaagaaatttatgaattactgcctaattacagtgacaattataatttagtgactgcttttatcgatagcttagtttggagggattccgcagcaattgattttgaaaaaattaagccttttgtaaacaagcaagtactcggtttcgataatagttttagtcattttcttgagacgctaatatctatttctggattagaagaacatcctttcaatgctaatttcttacataactggctattacagcattctttaccaaatcgagatgccttttggactactgcgttaaaatatagatatagtgaagactcagcatttaaaaatttgattgactgggcatggagtgggactgataaaagctatatatcagatgattcgatagagttagttgcaaccactctatgctggtttttaacttcaactaatagagagctaagggattgtacaactaaagcattggttaatttgttagaggaacgtatctccgttttaattaggataatcaataaattcgatgggataaatgatccatatgtttgggagagagtgtttgctgtagccctaggttgcacattgcgaacaaagaatcataataagctaagtcaattggcagagacagtttttgccaaagtgtttcaacctaaatatgtgtatccacatattctattacgagactatgcgagagagattatagagtatgtttcacatcttcaattgataccggaaggactcgacctatccaaaactaagccgccatacaaaagtaaatggcctgaaaatataccaaccaaagaagaacttcaatcactttataaaaaggatgggtattggtcactttggggatccataatgggtggaggagatttttctagatatactattggaacaaatcataatcactcaaattggtctggttgtaaatttggtgaaactcctattaatcgcaaaaaaatttttaacgattttctaggtcaattgtcagacgaacaaaaagcgctctacgactctacagaccctattatttacgataaaaattataaaagcatttcattcggtaatacacttattaaatatggtgtagcaataggtagaaagagtgaggaggaagttctttcccataaatccgcgttcaagaaatcattgccagaggacttattagctacatttgaaagagacatagaaaaatatttagatcacaataataatctgctcgaaaccgataaatattttgatctaagaattgctgaacgcatgatttttaatcgtgttattaaccttggttgggatccaaaacttcatggtgattttgataagcaggtaggctctgggcgcggacgaagagaatcgttacaagagcgaattgggaaaaaatatcaatggatttcttactatgaatatatggcaatgctttctgataattttattcgttttgatgggtatggagatgaacgcaaagaaaatccttatcaaggaccttgggatccatatgtaagagatatagatccaaccattttaatcaaaaatacaggaacaaaagagttaacccaacaagaaatgtggtgggatactaaagaagtatttgattgggattgtacttttcaagaatgggttagcaatccttccacgataagtaatccatatggactgattgaagtcaatgacaacaatggtactgaatggttgatattagaaagctatccctcatggaaagaacctaaaactatcggtaatgaagagtgggggcatcctcgaaaggaagtttggtgtcaaatcagaggatatttagttagaacaacagaattaaatgctcttaaaaattgggcagaaaaccaacactacatgggcaggtggatgccagaaggaagcaataggtatcaattatttaatagagagtattattggtctgaagcattccattattttaaatcagattattatggcagtttagattggagttctgtaacagatcaagattctggagctaaaattgctgatgtaagcgtcacatcgatcaattatttatgggaagaagagttcgataaatcaaaaacagatactttaagtttcctcaaaccaaccagcttaattttcgacaagatgggcctcaaagatggtaaatatgaaggtagttatgaggataaatatggaagtatagtttgtttcgccactgaagctttaaataactcaaaagcacatttgttaattaagaaagagccgttcttaaaaatgttgaatgaaaataatctagaaatagtgtggacgcttcttggtgaaaaaggtgttatcggtgggtccttaagttcaactcaccagtatggtcgtatagaattcagtggttttttttcttacgacgatggaaaactgactggagcaaacaaaatatattcatcttgatatttcctttaacttgaaattgtagcacagatagagacctatttgtgctgctaactaattcacgacattctcattatcaagtttttatcaatgatttagcttttagcttttagcttttagcttttagcttttagcttttagcttttagcttttagcttttagcttaacgttaatggagtttttgtagtagtgcattgccatccgttaacctctgaacatcaactcccaataagaatcataggaattaaaactctcaatttcagtaagttaactaaattctattgattttgacagccaattaaatcttctcggactaattattttttatccggattcccatttttcacccggacctatacctcccctccccgttccgcgctataaccgctccgatactctgttcccgtgaggtgcaatcatgaaaacccgtgctgacaataacgatgcttttcccgaaagcggcaatgtgcgtatgcggcaggtggtccagtttctggcgatgagtgaatcgtcggtttaccgcctgattaaaaacaccgactttccccgccccgtccacctatcttcccgactggtggttttcgatgccgctgaaatccgccagtggcagcagcgccgtaccgccatccgttaatccacgctcagggatgagccgaccgatacctcatcatgaaacgcgccccttttctctgtaagcagtctccggaccgcacgctcgaagtggtgatccttgccggaagcctggcatgggagacctcacgcgactggcgaaaagatcctgaccgggaagatgatattcctccggtggtactcggcccggatgaactggccgatctggacaacctgaccataatcaggcccgacacgctttacgtccgggtacttcgcaccggcgatatccgcgaagaggagttgctgaaaatcgccgtaaaactggcgcacgcgggtgtgcagatggcccggctgatgagccctgacggtgagttactggagaactggaccgggcagcttgaacgcctgcgacaggaaaggccttccgatatcctgccggatcacttccgcctcgatgaagaagcgctgtggtttgacaagctcaccgaacgacgcgacggcgaaagcgacgtccagccccagcgcatctgttcccctctgcgaccgggtcgcccgcttccacggcaccgcctttcgtgcctggctgaccttcctcaccggcgacctggacgccagcaccacgctggcgagagagttacttcgccgctaccagacggccctgatgccggacaacgccggaaatcaggtgcagcgcatcgtggcccgctttgcgctgctggcggtggccggagagatagcgacgctgcagggcattacgggctggcaggaaggcacggcgtatgaggcggtccggatctgcctgcacgcctggctgaacgagcgcggccatattgccaaccaggaggatgaaggcgtgctggcgcagatcaaacggttcatcaccgcgcaccagtacagccgttttgcctcgtgggatggcccggaccgcccgctgaatatggtgggctttcgccgggtggaaaaagatccgctgacgggcgaggaacacacgctgttcttcatcctgccggagggctggcgggaaatatgccggggattcagtcccgcaagtgcggccagattatgccaggaagcagaatgcctgctgcccggcagcgacgggaaataccagtcgcaggttcgcctgccggagatcggcaaagccagggtctaccggctcacctcccgcatcctcagtatctgagtgccatctcgcgtgtcttaaataaaggtggtacagaatgggacaagtggtacagagtgggacagccgttgctgaatctgtcccacttttccgactgatgtttttcaggtggtacagcgcaaggccacggctggcgcggttgtaccacttgtcccacctgtaccacctcaaaaacagaaggaatgaaaatggcgaaaagggactgaaaaggcaaaggctgaaaggaagggagaataaggggaacgggcctgctcttaaagggtcaaatagctcggtataaattgattcctaacgtataaaaaagacatcaatttccagagccactaattagtttgtttagttacaaacgatatggtcctgtgaatagttattttcatagagtcatacagataaaatcatcgtcccttgttcattatctgacgaaaaaaggaaaataccatgaggccacaacaagcgttcaacatgaacgtttagtgcatataagtcctctctagtccaagatggttgcttccagaagcgttcaagatcatgtgcaaacacatccacccacccagcaagttcacgtgcggcgattgctgcacctacatcagtatcagagtttagtaacggtgatttacttattccctgtaaatggccgattaatcgagccatagcaatcaaaatatcagctactgcagcatgcacagtcctaaacaattttgaatgattgttgtctattttatgttcttcttttgcgctaactatcttaaaaaaattcgaatcaagggctctaattacgtaatgtgaaaactcctgttctaataatccttcggctccaaattctgcacttgcaaaagcataataataggcacgcagagcctttcgcatagcacaatgcataacagctggatgattattcatcattacgggctccagcaggaattctggaagtacatactcaaagtgattaattgtatgaacaataaataatgatgaaacaagaagatgaatagctacttccctattttgcagatcttcaccagccaaagcatgagcataatcttgatgaaagacaatgcgtacttttattatcccattccgcttgactaaaagagcagcaccaccttgagcaaggtaatctgcttcactttctggagtttcatttccatcaaaaccacgttcgatatcttcaagtgccttttcacaattagatgcatatgtaattccatccaatcgtgaaagatccagccattggcttagttttgccacaaccccctgaactatctcattaatattctcaatatcatcactaagcccatcattaaaagtaatctgatagctaaatgaaggacaagagatactttccgcaacatttaaattatcataggccttatgttcacatagagtatccaatgtgtcatggacaagattatccattctatttttccatcgcccaccaatatttttacgtaaatattcatgagcagatgatgcagcaataaataattcatcactgcattccgaggcgtcatcgttgaatccagataggtcaacattgatattactcgctcgaactccaacaagtagtttctcggaagtaagaggcatgatgacagtagagatagaggaggccataatatagggaaggtaaacaccctcttcctcatcaaaaccaatagctatgcaatctggcataatcgccccttcttgcggggcagggaaaatacgccataataatgattcgagagactgcttccgagcctctacaacaacaccattattaagtacctttttatggccataactaatagcatcctcaataccagtgagaagttgagtgaacaagggctgtaattgaaagtaaaatggatttgcatcacctaaaaaactttcttttgcactcataaatagcattcgctctatcgaatcttttggaatgccaatttcctccgaaacaccccccaaggatttagctatttccggatttctattgaaagaagatgctatatgttcactccattttttatttgttgtaggttcatccagccctaaaagagatatcattaacgttttatcagatattacatcagctaagccagagataagtttttgtgtgccatggccaaatatactacgaaggcttttacttctaggtgttaaatgtgcaattacttctgcagcaatagatgcctcgacatcagtaccaacgtttttttcccgcaatatgcgaagcaattcccctaatctaccttcataatccgtcagtttatcatcaagagttttatttgcatcatttgctggcttagagtaaaaatccctttgtgctgccacactatcagttttagatatgaacattttatctctgcgataaacgtgtgtttgcccagattgctggcatatgagaaacccgcgcaggaataactgtggtatatagtgctgttttctgcctgacatactgatccctcaaatattttacttcagatcatttctaattatttggtgataataataaagtgcgaccggggttacgctttttaaaccgatgatattgaagaatcaattcagctaaatcatcgtcaacagcataaaaatacgcttccggtacatcaagcgctgcagccagcttacagacgagtttgaaatcgggtgcatggacttccttttcatacgaactgatccgcgcgcttgcggattcttcatccagccctgcgagtacacccagttccgcttgcgtcagatcagccctgactcttgaaatctttaatcttttaccaatcacgattgccaccctgcacctgaacatgcaggaattatccctttctgggcagcaaccatcttcaggcattcccttatctattcatgtattacttgaattttgattacatttagagcaatattcaagaattgcgtgatttatcacggttaaaaagagaaaaccgatgaaaaagtcaacaaccaaagactggcaccccgccgacatcgttgccgccttacacaaacgcggtaccagtctggcgaaactgtcgcgggaagcggggctggcctcgtcaacgctgtcgaataccctgacgcgcccgtggccgaaaggcgagtggctgattgccatcgcgctcgacatgcatccatcagaaatctggcccggccgttacctcaattccagtaacaaacgtgaaccccgaaaaccgcttcacccgatgacaacaaccgacaactccgggacataacgacccgcgctgtgagtggcaggacgcattaaccaacgacacctgacaggagagttgtttatgcacaccgaaccacaaccatgcaccatcgcaccactcgcaggaggccgccatgtttctggtctccctggctgaaggcttcatccacctgttccaggccgcaggcaaaatcttcctcgacatgatgaccgggcttatcccgatgctcatctgcctgctgctggccatcaacttcctgatgaagctggttggcaccgtacggatggagaaagtcgccgccctgctcggccgctcgcgcatcctcacctacggcgtgctgccggtactcggctggttctttatgagcagccccggcgcgctgacgctcggtaagctcttacctgagaagagtaaacccggctatgaagatgcactcggcaccactgcccaccccctcaccagcctgtttccccacgtggtgccatcggagttgttcgtctggctcggcgtggccgccggggttaaggagctcggtctgcccgtcacctcgctggcgttgcgctatatcgctgccgccatgctgattggtttaattcgcgggattatcaccgagtacctgttcctgcggctcagcaggcgggggaatgcgccatgatgatttactgcgcgcgtatcgtcgccatcgggctgtttgtcgccgacggcctgaccgacaagatgctcatcaccttcgacagcaacgggccgaaggactgtctcgattactccctgtcgctggagccgtcgttccgggaagagagcctgatgatactccccggcgaccgcctgctgctggcgggccatgattatctggtgaccagtgttggcaaaggggcacaacaggcgctgtttgaactcggccacctgacgctggtgtttaacggcgacctgaatgcctgccatgtcggcgcggttcatctctccggcccggtgccgaaactccgcgacctgcacggcaatctggtcattgaggagggacgcccatgaacacggtgcttattccccccggccccggtggctacggcaagggactgtggctgcccgtcggcagcggcaaaaaggtgctgtcgctcaccgggcgggaaatccatccggtggcgattgaaatcggcgcgctgacgcagtctgaggtggtcaacggctttgccgatattccgccggataacgacatcctctgcgtggtgattaactgcgcaggctctctgcgctgcggcctctatccgcagaaaggcattccgaccatcaacgtgctgcccacctggcgcgccgggccactggcgcagtttattaccgaagagaattacgtctccggcgtcacgatggagcaactggttctggtggataccgccgaagccccggacggtaaacctgaaacgactcaggagcctgcgccacgggttatcagtacaccgccgtctccacgaggcgcggagaaactggtgcgtatggtcgagcagaccggcaccgccgtcgggcacgttatcgccctgctgttcgccgccagccgcgaggcggtggacgtgtccctgcgcaacgttatcccgtttatggcctttgtctcgctgctgattgccctggtgcaggaaaccgcgctcggcagcctgatagcccatgccctgacgccgctggcgaactcgctctgggggctggtgctgctgtcgctcatctgcggcattccgttcctctccccggtgctcgggccgggggcagccatctcgcaggtgattggagtgatgattggtacgcagattggcgcgggtgcgatatctccggccttcgccctgcccgcgctgtttgccatcaacgtacaggtcggctgcgacttcgtgccggtaggtctttccatgcaggaggcaaagccggagaccattgcgaagggcgtccccgccttcctgctgtcgagacaactgactgggccgctggcggtaatagtcggctggttgttttccctgggcttattctgaggactccatgatgaacaaaatcagagccgccgtggtcggcgcaggcatctacggcagacaccatatgaacgcgtaccgccataagccggacacggtgctggtcgccatctgcgacaccgacatagagcgctgcgacgaccttgccatggcctacggcgtgatgggttatacccggctggatgtcctgttgcaggaggaagccatcgacgtggtctcggtggcgacaccggacccgtaccacaccgaatccatcctcaccgccctgcgccacggcaaacatgtgctggcggaaaaaccgctcgccacctcagtacgcgagtgtgagcttatcgtggagatggcgcagcagcgggacttgctggttggcgtcgatttccacaagcgctgggatccggcggtgatgcgcattaaggctgaactggataagccggaagccgggcgcatcctgcgcggccatatcagcatggatgacgtaatcagcgtgccgacggagtggctggactgggcggggcgcaagctctccggtgtggtttctcggctcacactgctttgacctggtgcgccacctctccggccaggaggtggtgtcggtgtacgccgtcgggcagaagcggctgatggctgaatgcggcctcgacaccttcgacagcgtgcagagcctgctgacgatggccgacggcagttcgtgggtggtggaaaactcgtgggtactgccggagggctttccgaaggacaacgacgggcgtatcgatattctctgcgaggcaacgtatatccgcagtacttcccaacatcgcgggctggaaatcaccacgccgggcatgacgctcacgcccaacagctatttcatcaactaccgcaacggcatcgccagtggtttcggtatcgacccgatcaatgactttgttcactccgtcagacataaagcgccgtacccggtcaccgcaatggacggactggcggtcagccggatttgtgaggcagtgcaccgcagcctggaaagcggcaaacctgaacgcccgataaagccataacttcaagggctgtacctgtctgctatgtcagactggtaaagcccttaacccagcaagctagtcaaagcacaggaatgatttgaaagcatggtcagctttgagcgagaagcagaagtttctgcttaattatttatattattggtgatttaattcccactcaatacatgatttcatcataggaataaacctctcacaagatgatgaaaatacctcaacaaattttaatttgtaactttccggaacatgccaatcttgagggatgctatctgcgatggattgataaaattcaataggtatttcacaaattttatccatacatgatttatactcttctgcagaatgcaaaattccgcgatgatatggcgatgattcaataaacaatttattttctgtccatataagaccaccttccccccacgcctcacaattatcatcctcaaaggctattccagcatccatgaatagcagttcaccatttaacaatttgcaagtatcattttttacatcacctattgatagccaattatcaaatattgatttgccatagagattttttatttggttattactgaattgataaccctcaggcaactcttctagattatgcatgaactcatatgcaataaaatgagaagttgatacatttagttcactctttacactttctgaaaactgaactagatggccctttggccaaggtaaacctatcttctcagctaatttaaaagctactaattcattaaataacgcatttgtttcatgaccggacttgctgaaatatgtttttacaaaccaatcattgcctaactcatcaacaccaataaaaggattggagtgatttgtggatttttccagtttatctttaatggaattaattataatcacggtaaccttcaatagaaacaataaaatatgacgcgaagtataattgtataaccaaatagagcacaaacattttcgagagactcctgagttattaatttttctacgtgagctacctctggtgaagagtttactcacttaaccgcatgtccactattggtgggtaagatcattaaacatgtatcaaccagactgaaggcataatctttgattattccgacatctggcacacagtcgcgccagatgccactctgttcttctaacctcagtgatgctgcaacaacacctgtgaaatcttcctcgcttcatccgccggatccgccgaatgcgtgatcgccgaccccacaattaccacatccgggcctaacagcgcatagtccttcaccgtctggctgctgataccacctgccacggcaatccgggctttacggcgcgccttcaacatcgttatcaaatcatcaatcggcttgcgccctgccgcctgctggtcggtgcctgtgtgtaccgccagcatatccgcgcccgcctcttccaggaggcggacccgcgcagggagatcgtcgacgcagatcatatccaccaccacctgctttccggcctctttagccgcccgaatgcatgactggatagtcaacacgtcagtcacgcctaacaccgtgacataatctgccccggcgtcgaaaagcatctgcgactcaaaatggccaccatccataattttcgcatccgccagcacttccttatgcgggtatttttctttaatggctttaatcgcgttcacgccttcccgaattagaaaaggcgtgcccacttcaataatatcaacgtcgtcaaccaccttatcaataaataccagcgcttcaggcagggttaactcgtccagggcaagctgtaatttcatgttggtttccttgtgttgaatgactattcgaggttggcgtgcagcgcaaagcctttggttaagtgatatcccgtcgactgggccagattcacaatcatggcgtcacccagcaccatgacagcctcttcaaacaggctgccgccgggcagaattcctttcacgttatccggtccatccggcaatttgtcggtataggccgggatcctgaccaccacatccgccagtttccccagcgtggactcggggaaaatggtcagcaaggccacggtgccacccagttgcttcgctttcgcagccacattcaccagcgaagccgtttcgcccgatgcactcgccagtaacagcaggtcgcctttttgcagcgcaggcgtgaccacatcgccgacaacatgcaccttcaggccgatatgcatcaggcgcatcgcaaaagctttcagcattaacagcgaacgccctgcgccaaaaacaaataccgcgttcgcctcagcgatggcctgctccagactcgccagtgcggcaccatcaatccgcgacatcgcctgatgcaggtcagtacaggcaacgcctgcaacaaattgcgtttccatcatgcgtcctcctgactgagcgggaataaatcatcctgatactcgagcatccccatgatttcccggacatagttatcgacatgccccagaaaatggaaacgttccggcgcggcgcgatagcgctggtaaagtggcgtatcgaaggtgatgccaagatgcgggttctctttgacggtggcgaatttgatgtacggaatatgcggatagtaatgattcttgcgcacgcagagctgcccgttctcctccacgatgtagcaggccataccgtggtaaaactgcaccgtgtcgtagtgaaccgcgcagggtttatacgccaggttgctgaataccagcggcccgtcgccgatattgatagagcagtggccgtaattcggcggcacgataatgctctgcccttccttcaccaccgctacgataagatcgtccaccagcagatcttttggctcaacggcaaaatccggcgacttttgcaggatatacgccgcagtgcccttaatcacttcatacacttccggatgggtgttgcgccgcgtatcgttatagccgtgatagtgaccgctggttttcttgcgctccttgccaatcgttcccggcatgatgatggtgatgtcgtactgatactgatcagcggcaagccgttcctgatcctccggaaagcacaagccgcgataaacatcgtaagccggttcatcgcatagcgcttcggtgaactccggtaagaccaccgccatctgcccggcgcttttgcggccaaagccgagatagtttagcggcggtttcagcgccattacgccatcatcatcgagatacagcggcaggccgctgtggtgtagctgtttcattttgcctcctgtgtatacgcgttagctgcgcggatcgcctctttcagccgatcggacttcatgccaaatacgctctggatgttgttcccgacctcgacgatgcccgccgcgccaagctgtttcagcagcgctttgtccaccagcgtcttatccgttacgtcaatgcgcagacgcgacatgcaggcttcgatgctggtcatatttcccagtccgccataggccagaatgatgccgctcaccaggtcgttttgttcgctttcctgcgccaccgcgttttcttcaacctcacgccccggcgtcagcaaattccagctacgaatagcaaaggtaaacagggcgtagtacagcgcccccatcaccagcccgaccgggaacaccatataccagtgaggcgcgcgcggcaggacgccaaagaacagatagtcaataagcccgccagagaaagagagcccgatatgcacgctgaaccactccatcagcaggaacaccagtcccgccaggacggcgtgaatgccatacagcacgggcgcaacaaacaggaaggagaactcaatcggctcggtgatgccgcagacaatggaggtgatcgcgccagagagcataatgcccttcacccgcgctctgttttccgggctggcacagcggtagatcgccagcgcaatcgccggaatacagaacattttgatgggcgtcagcccggccataaaggttccggcggtaatcggcacctggtctttcaactgggcaaagaagataagctggtcgccatgcaccacctgcccggccttattcacgtactcgccaaactgcagccagaaggtcggccaccagacatggttaagaccaaacgggatcagcagctgctcgacaaaaccaaacaggaaggcggacacgcccggcccctgcaccgtcatggtattcgacaggccattaatcagatgctgaacaggcggccagaccaccgccatcaccagcccgacgaacagcgcggcgaaggaggttataatcggcacaaaacgcttgccggaaaagaactccagccacgaaggaagctggatgcggtaatagcgtttatacagccaggcggcgataatcccaatgatgatgccgccaaacacgccagtctggagcgaagggatgcccagcaccatcgtgtagtcacgcacctgcgccaccgactcgggcgtgatccccagaaactggccgatggtgacgttcataatcagaaacccggcgatcgccgacagcccggcaatgccctgatcgtcactaagccctaccgccacgccgaccgcaaacagcagcggcaggttagcgaaaatcacgctgcctgcttccgccatcagcttcagcacgtgaaccagccagtccgcgccgagaaacggcaggctggcgacaatattgggatcctgaaagctgacgccgaaggccagcaaaataccggcggcaggcagcatggcaatggggatcatgagcgatcgcccgatgctttgtaacatttgcagaaggttgaatcttttcatctcgatctcctgagcgcgtctttatgacagggattcgcacaacagcaggttctgctccgaacaccttcagtatccgaaccggggatgattaaaaaaacagcaaccaaagacgaaagttatttccggttttcgcttaaaaccggaaaatttatgagggcaatcacgccgcaaaccgtcagaaagagataaaagaggaaatcgcgttcggcgggaggccatcatatgaatatcttcgaggcgcattttcgcagactgcacgcccgctacggcgcaggtcagacgcacgaattacagatgcaggagatcgccgccatcttcggctgttcagtgcgtaactgccgtattgcgctgaagaagatgcatcaggaaaaatggctcgactggcagccgcagcgcggacgcggcaagcgctcacggctccatctgttaacctcgccggaaaagctgttcagccagaacgtcaataagctgctggagaagcaggattacggcaacgtgctgaggtttatcggcaacgacaagtatctgctggatcgcctgagcctgtggcgctttggggtacaggataaaagcagcgaaacgcgggtgcgcatcccctactaccgcaatctggatccgcttaatccgctcgttcccctgcggcgaaccgaacgccacctcctgcgccagtgcctgagcgggctgacgcgctatgacgccattcagggcaggatcgtccccgatatcgcccactactggacccacaacgacgactttacccgctgggagttctggctgaaatccaccgcccgctttgccgatggcaatgagctggatgccagcgccgttcagcgcggcctgctcgccgccagccagagcccgcagttcgcgccgcttttcagcccaatcaaagccatcaccgctgacgccccctggcatctggtgattgaaacgcatcacccggtcaggcggctcgactgcctgctcgccacccagccgacgatgctgtttgattaccagcacggacacatccgctgtaccggcgctttccacctgcaggagcacagcgacaactttatggttttgcggcgcaatcaacactggcatcaggcgcgccccggactggatgagatcaccattttcacctgggcgccagaacatatcagcatgagctttattcccctgctgcggggcgaagaggcgcaggatgaccgcccgcttaacgagcgtagtctggaacagggatgctgttttgttctgctcgacggtgacggtgcctttgcggatgaggccagaagacggtttatcaattatctgctgcaacctgtcgaactcctcagccagacgcagcttcccgacgaatacgcacgcatcctctccgttgctcagggcatgctgccgcattggaatcaccgcccggtggatttcggcgggatcaccgcgccgtttaacctgcgtcagccggtgatcatcagcacctttcagcaaccggaactggcggagcttgccggggcgattcgcatcctgcttgagcgctggcatattcgcgccgaaatacggatcgacgcatttgaccgctttaacagccagccgcttcctcctgcggatatctggctcagcaactttatgctcgatacgctttcggttccggcgtttctggaatggctggcgtccaccacgctgtttacacgactgcctgaatcccagcgacgcaacctgaacgccctgctgtcgaccattctgaacagcgacgatgaacaggcattcgccaccattgccgcctttttccatgagattacccatcaacgatatgtcattcctttgctgcatcactggatggaatttgcgaccgagaagtcatttacctggcgggatttaaatacgctgggatggccggatttcagccaactttggctcgaataatgctacgcccgcaaaagctcgctaaagggcctttaaaggcctttaagggtaagggagagaagtgtgggatttgggggggaatgtttgaccatctgcattggctacgtcctcacgacggagcctgttcaaaggcctatgtactgacgccccaatatggctttaccgccagcgccgattgttgaacacgtcaatgtcatcgaagatatctgcatgatccagatcctgggttttgtagacccgttttctgatgcactgctttttcagcgaactgaagtaaggtcgtagaagtaaaacagtaccgcctggcaactcgggcattttctcgttctaccactgtgcttagattcagcttatgacgtcagccgatagtgcgactgcaccagacccgaagggaagctgcggctggataatagcgtcaaatcgacatcatggggcagcactccgaacagcggttttcccgaaccgagcaggacaggaacggtagtgataacgatatcgtcgaccagaccttcgcgcaggaacgactgtattaactgcccaccatcgatatagacccggtgcacgttcttctccatcaggtcagtaagagcctccctgggcgtgcggcatgaaaactgcactttgcccttcagcgcctcaggcaccggggtattggttagctgccgggaaagtaccagcacgggtcgatcataaggccattcctcaaaagtcagcaccttctcataactgcctcgccccataatgatccaatctttgtccgcgatgaatgcggcatagccatggtcttctgtcgggtcatcgcgcttcaacagccagtcgatatcgccatcctgtcgagcgatataaccatcaagactgaccgcgatgaaaacatgtgtggtaatcatcaagtgctccgtattcaggttgcatatatctcgttgagtttagcaatgtaaacgatattgatatgctccgataaagccacatcataatgttctcaacgtccgttctaggcacgaagcaagcaagttatctaagctgaaggtccgctgtgagcgagaagcagacattgtgttcatgtggaaaaccggaagatttagcatccggttttccgcactcttggattacattaatgatctccagcatctcgtgctggcaccgcagcagcttgtcgcacttgacgacgctgatttcttttttcccactttgctcgtaaccattcgctatatgccggcatgttaaggtataactgctgtgtcatatcggccagaacgcgaagattatctgtatagccgaagtgtccctttcccatttcagcatggcggccacctgcagcatcccaggcttgagaaagcgaatatggtgcgaacagctctagaccagttaagagtattacaggagcccttgtttgtcggcgctcgtggatgtattcacgcccccaagacgcgagttttgtaattcgctgaatttcggccggggaaagatctcctgcctgcttcatggttgcaaaaaccaaaattgcgccagggaagcggatagcaagttgtttcattctttctacatcttcaacttcaaatgcatcagcaacagcttttttctcttcggaattctcgcccctaaagctttttgcctctccaaatacgagttctgcgtggtgatccagctcattgaaaactttgcgtcggtgccagagtattaggtcagcttcaatatattgttttggggccaatgtcagtatttggccggttgaccatgtaatcgtggcatcatgatttccaaatgtgttggcgagaaatcttagcgttagggatgcggcgtatcccccacgagcataatcgggaagtgcaaaggggcctatcaacctgtaagcccaacgggacaattgactcgaacttggatcgatcattggaaagctaaacttatttaggcaaaggccgcatgctactacaagatccagttcgcgtagcgcgtgccatccccaagtagagcattttgcacactttaactccaagccaagctcaacagcaccaagctcaactaaagtttcagcatttttatttcgccatatatcacccttcaccacattattaattttattctgaaattcttggtgttgaattgagggtgaaatgggccgtcgagaaattttattgagaagtttcactatctctgcatgagcaaaactactaattcccctgaaacctccgagcgtattaataatttgctgtgtagcttgtcctgcatcggagatttggctttcaactccattgttttttagccattcacttatcgccgttgtgccgtcactcaaacgccagagatcggacatattatggaaacggcaaaatacaacaaaaccttcagttgtagataagatgcttctctgtattgactggaaacgtggcatcttgggcgacctgtaattacaaggataaacggttgcagcccgactggtatttgaccaattttttaatttcactacgttcacccagcgagcatcattggcaccatatctttcagtgaattctggatggagataatcaaatcgaacttcggttcggtcaccttcgatttgtgtgtcaaacgttttttctgcacaggatagagtaggtcgagtactgcgaactgtaaaaccagatgatggtcgccaaatcggtggataccaatcttgacgcctatttgcctcatcttgattaacccgcaaatagtcggcgtaaagttgttcgatattcgcagtagggatagatcttgcaaacattacggtagcatgagtcattaagccaaattgattccctcgaacggggcgatggcaatcttcaatgtattctctgcagtatggggaaagcgcatcaatccattggagtggaattggtcggacatatttccgcatagcgcgaaggttccagaagtcaataagatcgcgcgagtcatgtgcatccatgacaaagagcgttggatccgcattgtcatgataattaacctcaatattcgagtgaccgatttgtagtgctgaattaaatccatccttgtacaggtctactagagcttctggggataattcaacctgtttgggatcaaaagcatcacagaacccttggccaaaatatttaaggtcttcatcctcagggaagctgccagataggcaagcacagaacgacttcaatgcattcgtccgaggtatgagttccacgatattgtgctcatgtcgacgcacgaattgaaattgtttcttatacagatctttatataggtcgaagacatcaagcccagcttgaccccgcagttcatcagatcgccttagcatggctgaaagttgcagtactcggtctgggtcatagccaaaccctttagccagccctgcttcagcttctacaaggaaatcaggttcgaaagcatcaagatagccattgacgatctgcaaagcgctctcaggtttgtagtcatccctatcccaccatttaggcacatggccaaaaattggaatgatagggttaaatttaccgccccaaaggcatgtgtttatttggaagatttccagtaaccgtttactgtcattaggtttaacgaggaatgcgaatcgaattggtcgtagggttacgacggcgctgatatgagccataattcttcctgtcagaatgtagtacgttcactttgaggttgcataaccgatttgtcacgcaccgcgtaactgagcgtttacaagcattctactttgatttacctgccgtttaaaaatggtttaagcattatgttgtgtggaaaaagaggctattgatctacacctaaaattaaatctacgttcagttaataacgtccgctcttggcacaatgctgacgggacatgagcactctcggagttcggaccagaaatggaatggcctgaataagaagggtaagtcttataacgaaaaggccgcgaaagcggccttttttagtccgatgcaacctaactagactgttgaaacggcaggctttaaagtaatctcacgcaagacgttaatcagctcgcggccacattttaagtgcggcattccctagcaacgcaccacgggagagaatttgttcctcatcccatctgtctttaacggtcagaggcacgttcaaacgcaggctggtatgggcaagaaaagcatcgcgtttctttagaaaatctgagtgttggagggatcgattcacgctgaggttaagtaacgtaagatttcccaaagttgcaattacttgctgccgtttccgcaccagttcctgatcaggcgtcagctccgcccctgcaagaactatctgagcaaccgctgatgcttctgtatccgtaacagattgcccattttcgagaggccagtgagagaaccactgttgaggcataaggtgatcgatatcaaggctggaaagtttaggaacatctggttcctctgttttaacctgacggcgcagttccccttcaagctctgtcagcatcatacgcatcttcggtgtatcaagcctgccaggataaagctgtgcggtgatacaggcattaaggaattctgagtcagtcggccagcgagaagcctcgccattcagattcttaaggctgtagcgtagctcaatactagaaacggcagttttagccaggtgccgtaagacagccatgaatatgttattgtagttcttaggtgtcaacccacacacggctcttcgtacaacatatgagactagatcattaaacatgattgtcttttcggtatcagagatatcagtgactgaaatcaggagcgcaagaggatgaatagtcgtcacgtcataggctgcaatacgacggccaaagcgcgcgacaggagtcgtaccactatctccgatcagttctttatattgattagcatagcgagtgagaagcgcgacctgctgatcggcgcggcgcgcaggcatatccttagtcacaaagtcccggaattcattgtaaaggcgcgacaaatccacctcactgcgtttttcagcctgtagcgtggcgtgaattaaccattccagtcggggtttataaatacgaccacggcgttgattttcagtccagtagggatcttcaaaaggcttccagtcattctcatacaacatcgcagcatcaatatcgtcacttacagcgcgcataaagatgtaattgcgaatgagatcagttgcatgaagttctgccccacggccatttaacgtttcaaaaatgatttgagcatcatctccttcctccagggtgatgttgatcattttgaggtcagtcaggactgcattaatcaaagcctctgcatttgaggctacagggtgcccttccgcgttgatgaactgaataaaagcgtcactaaagaaccataatgcttccagtgagggtgggtggctgaaatacttacgcagggtcccgtgttgtgtgaagttttccggatagacctcgcgaagagcttcgactgagtcaacgttgagacttttaataaagtctttttgatcacggaatgtcggccaaagtttgaaacgttcaacgtctacattacgcatagtctcttcgtttatgttgcgtaaacaaggcaatacgatcttctccaggccggaaagtcctgttgcccgaagagcaagacggatggaagcaagaacatactgaagtgtggtgagtcgctgctggccatcaatgatgtgtgacgtatccacccccaataggctgtctttggattgtggttcgagcacgatggccccgaggaagtgaggcgttggttttgttttagaaagtctgctctcagccttatcgataatatcttctaataaagctgaccattggtctcttagtgtccatacataggctcgttgataaaatggaacgcaatactgccgacgattctggaagagttgattgacggtaagcggctctgatttcatggggttcctataataacgttaagtattttaagagcttaagaaacgtaaggttgccaccacctattcaggtaacaagctcctgtagaagtcagttaagatatcgaagattattggtaagcgtaaagtgatagccgcattgacggctatcactttacgcttaccctgtatcgccgtcgattattagtatgtatttgatgagcatggtctacaggccagaaaattaaagagagtgaattatccgacagaaacgctcactttcggaaacgaacgacaagcctgtagcgtccaccagagcctaaactagcaaggaaaatcccactcccaacaatcaacttaaaaatcaatcagataaaaaaacccttccatatcaacatcatcgccactctttttgcgcctttccttcaccgcaaaaaatcaaaatccccaacaaactcaaccacctcccccaccaattacaaggacgccagcaaaattctccatcggtgattaccagagtcatccgatgaagtcctgaaaacccgcacggcgcaagccctgcgggcttttttgtgcctgcaatttgtcccgcgaagtctgaagagaactcattaaatccgaaccttttaggcccattgataggcccaacgaaaagctctgttgttttcgcgttaccaattacccggcaacccatccctctcagaattagaccaccaacgacacctttcaccctccggccgcgtccgcggccggagggatagatttaccccttgtgagaatacgcgtccagcatggcaaggaccgcccgacgcgccgcatcgtctgcaatattctcaggcagcgcatcagcccgcagattgacataagcgtcggcagcccttcggatggcaatcccgacagagtgacgatcgtgcgttgccagagtggaagtcagcaggccatcgggatcaatgccgagggcttctattcgacgaacgccgcgttgcggtagattggcgcgacgaaacagcatcggtcccagcacttgttcccggaagaaagacagcatccccagcgcttcgaagagttcccccctgcccagtttaaccacggcataatgcagccagatccaggcccgggactcaaaccactccggcgtcatgttcggccagtgcgcgctaaattttgccagctgtcgcttgagagcatcgttatcacgggtaaatagcacggtaggctcctcaacgcgctgagtgagcatgtccagggtgataaatttcagatcgacatgcagaagttccgggccaaacaggcagatcagcaggcgaggctcaccgacgtgttccccggtgaaagcatgtagcagatggccgagcgttccggcgaacgccatacgctgagccatgatttcgtcataatagagagggtcgatcaccaccacgaaatccagatcggagtattgatcaaacccgccatggataaacgagccgccggcgagaagggagtggatccgcgaatcagactgtaatttaagcttcagttgctctgcaaaacttctgtgtaaatcgggtagcgtattaagcatactttttcctgttcacaaaaaagacaaagcattacagaatatcgagtgattcattagcagaccagatatttctgctggaaccctaccctccatcgcgaagcgctaaatgcaagcaatactcccctcaaaccacctcgctcatccactcagcaaacgcccgcacggcgggagagagaaagcgctggtgcggatagagcaatgtgacgggtaccgggggcggctgccagtccgtcagcacttccaccagtctcccctcctgcaggtggtcagcaacgatattctccgccagctgcgccagcccaaatcctgccaggcacatttttatatagagccccgtttcattcaccgcggcgttgccgctgacgggtacagaaaaggtctcgccatggcgaacgaagcggaactcatcggcccgcctcgcctgaccggagaaataatgcacagcccggtgctgagagagcgcctccggtgacggcggcacaccatattcccgaagatagtccggtgacgcgcaggtgacccagcgaaagcggcccagagggcgggccaccaggctggagttgttcagctctcccgttcgtatcacgcagtcgacgccttcctgaatgagatcgacctggcgatcgctgacgccgatcatcaggtagatatcgggatagcgccggtaaaagtccggcagatgcggcatgacgatgaaatgcgcgatgcccgcgggcatatcaacccgcaggcgcccctgaggccgcgcgacagactcgctcagggtggattcactatgttcgatgagggcgagaatttcccggcactgcgccagatactgcatcccttccggggtaaggctcacccgccttgtggtccggttcagcagccgcaccttcaggtatttttcaaggtttttaatggtactggtgacagtggaggccggcagggaaagggtttccgcggcacgcacgaagcttcctgcctccgcgacgcgcataaacatctgcatagcctgaatacgatccaccttctttctctcctgtagcgagcagcttaccgacagacggcatgattattcgtggattatgaataatgaaaacaatttacgcacctttttacgcttaatcgcctggcgtatcgttgcacggtggattacgaaagggggccagaaaatgaacatgccctcaataaatattcagataatcattacgttaaatagcatgcacaaaggaaaaaccatgtccgttcagcctgtcgaaataagtaaggcctatcgtttattgcaggtcgggtccaccaccatgatttccgcaaaatatgatggcgtcgaaaatgtcatgtcagccgcctgggttgggctggcaggcgagcgaaaagtggtggcctatattggcacccaggctttcactcgtcagctggtggaaaagagcggctatttcgtggtgcagatccccgtagtcagccagatggcaaccgtcctctacgctggcgggcgcagctctgccgacgcgccggataaaaatgacaccatccccttcttttatcagccggaatttgatcttcctcttgtggcaggctgtgcgggctggctggtgtgcaaagtgatgccctacccggacattcagcagcaacacaatctgtttatgggcgatatcgtcgccgcctggagcgatgaccgggtattccgcaacggacactggatttttgatgatgcgccggacgagctacggaccgttcactatgtcgcaggcgggcagttctatgccatcggcaaaggcagcaaattcgatcatgggccgggtcaggactgaccctccccggtcatgcggatcgctgacgagatgtctgcgcaacagagcggctgatactccggcgccagacgccgggcgcctgcccgtactggcgcttgaagctgcggttgaaggactgctgggagtcaaagccgagggcaatcgccacgttcaggatcggctcgttgctgtgggccaagcgttcgatcgacttttgcagctttttcgcccgaatatattctccgaggggctgcccggtatgttctttgaagatccgctgcaggtgccacttcgaatagccggctcgtcgggcaacggtgtcaatatccagacggctatcaagatggttgtcgatccagtcgatcagatcctgaatgatggcgccagtgttcatcatgttaccccctcgcggccggttaaaagcatctttgtcagttgcatttaaaggtggcctgtttttacacaaaatgcaagttttattgttacatttaaatccacgccgggatcgcggttttttatccccccctggaccgcacataaagtgcaacaattattcttgcacttagttaagcgccttcctacaatcgccgcgatagtgtattcgaaattgttacagttttgtggcgatgatcgacacaaatggccttaagccagcccggacaaaggaagtggcgcggcttctcacgctgcgtcttgcccggcggctacatttaccggaataaaaataatgagcctgcaaaaaacctggggaaacattcacctgaccgcgctcggcgcgatgatgctctcctttctgctcgtcggctgcgacgacagcgtcgcgcagaatgctgcgcctcccgccccgacggtcagcgccgctaaggtgctggtgaagtcgatcagtcagtgggatagttttaacggtcgcattgaagcggtggagagcgttcagcttcgccctcgcgtctcgggatacattgataaagtgaattacaccgacggccaggaggtgaaaaagggccaggtgctgttcacgatagatgacagaacctatcgcgccgcgctggagcaggcgcaggcggcgttggcaagagccaaaacgcaggccagcctggcgcaaagcgaggcgaaccgcaccgataaattagtccataccaacctcgtctcccgtgaagagtgggagcagcgccggtcagccgcggttcaggcgcaggccgacattcgcgccgcgcaggcggcggtggatgccgcgcagcttaacctcgacttcaccaaagtgaccgcccctattgacggccgcgccagccgggcgctgatcaccagcggtaacctggtcaccgcgggcgacaccgccagcgtgctcaccaccctggtctcgcagaagacggtgtacgtctactttgacgtcgacgagtcaacctacctccactatcaaaacctcgcccgccgcgggcaaggcgcgtccagcgataatcaggcgctcccggtggagattggcctggttggcgaggaaggttacccccaccagggcaaagtggattttctcgataatcagttaacgccgagtaccggcaccatccgcatgcgtgcgctgctggataactcgcagcgtctgttcacaccggggctgtttgcccgcgtgcgtctgccgggcagcgcagagttcaaagccacgctgatcgacgacaaagcggtactgaccgatcaggatcgtaaatacgtctatatcgttgataaagatggtaaagcacagcgccgcgacattaccccagggcggctggcagacggtttacgcatcgttcagaaggggttgaatcctggggatagcgtcatcgtcgacggcttacaaaaagtgtttatgccgggtatgccggttaacgccaaaaccgttgccatgacctccagcgccacccttaactgatccctaatcagagaatccaagacatggacttttcccgcttttttatcgacaggccgattttcgccgcggtgctgtcgattttaatttttatcaccgggttaatcgctatcccgctgctgccggtgagcgaatatccggacgtcgtcccgccgagcgtccaggtgcgcgcggagtatcccggcgccaacccgaaagtgattgccgagaccgtggcgacgccgctggaggaagcgatcaacggcgttgaaaacatgatgtatatgaaatcggtcgccggctccgacggcgtgctggtcaccaccgtcaccttccgcccgggtaccgacccggatcaggcgcaggttcaggtgcagaaccgcgtcgcgcaggccgaagcgcgtctgccggaggatgtacgccgtctggggatcaccacccagaagcagtctccgacgctgaccctggtggtgcatctgttttcgccaaagggtaagtacgactcgctgtatatgcgcaactacgccacgctgaaagtgaaggatgagctggcgcgcctgcccggcgtcggtcagatccagatttttggctccggtgaatatgcgatgcgcgtctggctggatcccaataaggtcgcggcccgcggtctgacggcctcggatgtggtgacggcgatgcaggagcaaaacgtccaggtgtctgccggacagcttggcgccgagccgctgccgcaggagagcgatttcctgatctccattaacgcccagggccgtctgcataccgaagaagagtttggcaatatcattctgaaaacggcgcaggatggctcgctggtccgcctgcgcgacgtggcgcgcatcgagatgggttccggtagctatgcgctgcgctcccagctcaacaataaggatgcggtcgggatcggtatcttccagtcacccggcgctaacgccatcgatctgtcgaacgcggtacgcgccaaaatggccgagctggccacccgcttcccggaagatatgcaatgggcggcgccgtacgacccgacggttttcgtccgcgactccatccgcgcggtggtgcagacgctgctggaggcggtagtgctggtggtgctggtagtgatcctgttcctgcagacctggcgcgcgtcgattatcccgctgatcgcggtgccggtatcggtggtgggtaccttcagcattctctatctgctgggcttctcgctgaataccctgagcctgttcgggctggtactggcgattggtatcgtggtggacgacgccatcgtggtggtggagaacgtcgagcgtaatatcgaagaggggcttgcgccgcttgccgcggcgcatcaggcgatgcgtgaggtctccgggccgattatcgccattgcgctggtgctgtgtgcggtgttcgtaccgatggcgtttctctccggggtcaccggccagttctacaaacagttcgcggtgaccatcgccatctcgacggtgatctcggccatcaactcgctgacgctctccccggcgctggcggccctgctgttaaagccgcacggcgcgaagaaagacctccctacccggctgatcgatcgcctgtttggctggattttccgtccgtttaaccgctttttcctgcgcagctcgaacggctatcagggactggtaggcaaaacgcttggacgccgtggcgcagtgtttgcggtgtacctgctgctgctctgcgccgctggggtgatgtttaaagtcgtccccggcgggtttattcccacccaggataagctgtatctcattggcggcgtgaagatgccggaagggtcgtcgctggcgcgcaccgacgcggtgatccgcaaaatgagcgagatcgggatgaataccgaaggggtcgactatgcggtcgctttcccggggcttaacgcgctgcagttcaccaacacgccgaataccgggacggtcttttttggcctgaaaccgttcgaccagcgcaaacacacggcggcggaaattaacgcggagatcaacgccaaaatcgcgcaaatccagcagggctttggcttctccatcctgccgccgccgattttaggactgggtcagggttccggctactctctgtacatccaggatcgcggagggctgggctatggcgcgctgcaaagcgcggtgaatgcgatgtccggggcgattatgcagacgccggggatgcacttcccgatctcgacttaccaggctaacgtgccgcagctggacgtgcaggtcgatcgcgataaggcgaaagcacagggggtatcgctaaccgagctattcggtacgctgcagacctatctcggctcgtcttatgtcaatgactttaaccagttcgggcgtacctggcgcgtgatggcccaggccgatgggccataccgcgagagcgtggaagatatcgccaacctgcgcacccgcaataatcagggcgaaatggtgccgatcggcagtatggtgaatatcagtaccacctacgggccggatccggtgatccgctacaacggttatccggcggcggacctgattggcgatgccgatccgcgggtcctctcttcttcacaggcgatgacgcatctggaggagctgtcgaagcagatcctgccgaatgggatgaatattgagtggacggatctcagcttccagcaggccacccagggcaacacggcgctgatcgtcttcccggtggcggtgctgctggcgttcctcgtgctggccgcgctgtatgaaagctggaccctgccgctggcggtgatccttatcgtaccgatgacgatgctctccgcgctgtttggcgtctggctgaccgggggcgataacaacgtcttcgtgcaggtgggtctggtggtcctgatgggcctggcctgtaaaaacgccattctgatcgtcgagtttgcccgcgagctggagatccaggggaaaggcatcatggaagcggcgctggaggcatgccgcctgcgtctgcgcccgatcgtgatgacctccatcgcctttatcgccgggaccattccgctgatcctcggccacggcgcgggggcggaagtccgcggcgtcaccgggatcacggtattctccgggatgctgggcgtgacgctcttcggtctgttcctgacgccggtgttttacgtgacgctgcggaaactggtgacccgcaggaagccggtccaggaggatctgcccgcctagcctgcagcagataacaaaaaaaccgccttcacaatttgaaggcggttttttttcgtcaccagaaaatgattaatgcgcttttttaaagcgggcgatcatttccggcaccgggtcgcagccgctggtatcggcgtttttgaccgcctccagcgcgctggccacggtatggcgagcgaggacgtttaacgaagcctgctctgcttcgtcggcaaccgatttgaagtaccagcaggcgttggcgctgaccacgcagcgggccgggacgtcaggacgcgatgcccacagttttttatcttcgataaccgaaagatagatatcacgcagggtgatcttgtccgccggacggccaagatgaattgagccgttgcggccaagcgtggagacgataatgccgtcacgagttagcggaaccattagtttacggataaagctcgggttcgcttccaggccgtaggccagaatcgcactcgtcgaacgttcacccatctgctccgccattgctacgctgagaaccatctgcaaagctgtcgggaagcggtaatctaacatggcagtgtcctgggttgcggtgaatcttgttctttttggcaccgcagaggtgaataatcaatgaacaacaatataacaaatacgggaatttttttgaagcaatctgcggttagcctgcgaagtaaattttctgatttcacgggcaaaggcggggcaaacacagattccctttcgtaccgttttatttaacgcaaacgccatcctttgttccgctagccgcgacctgtccacaccagcggcgcctaaccctgtggataacctggaggcagttgcctggcagccgcagcccgggcgggctaccggccgccgttcgttttttgaacaggggacatacccccgccgggcagcgcgctaagcgcgaaaatcaccaccccggcacagggaagcgcccgccccgcttaataattccacttcggccgcgctaccgtatttttcttcagcagatcgcggaacgctttcagatagggttcattgctgcgcccgcgcttacagatggccgagaacggcgactgaaagccaaactcgttgggcagcagcacccgcaggcggttctctttgatccacggccaggcgtaatgctccggcagatagccaatatatttccccgagaggatcagcagcagctgggcgtcgacggtctcgacggtggcgctccctttgctgaagccccgacggcggagatcgctggtgttccagtagctgcgggtcaccagcgggcactggctgatctgctctttatcgagctggcggctgaagaacatcgggtgcagatcgctgcagtagagccagtgctgttcacggtacagcggctcgctgatgatgttatgcacctgcgagttgtagctgccgatagccaggtcgatatggttgttcagcacgccgttcagttgctccgccggggtgcggataatcagtttgatatgcacatggggaaatttgtcgctgaagctgcgcagaaccaccggcagcgagagcgccgtttcggtctcgatggagtcgagcgtcgagatgcacagggtgccgctgtgctcccctttgagcagcgccgactgccgctccagctcattgagttcgctcagtacgcggatcgcctgctgtaaaaactgctgacctttctcggtcagagaaaagccgccgcgcccgcgctggcagagggtgaagccgagctgtccctccagctgcgacatcgcattgctgatggcggagaccgaaatacccagctcctgctgggcccggctgtagctctccaggcgggccaccgcctcgaaaacctgcagctggcgaatattgaggctggcgtcgtgatgcatcgtatttagttcaccaataaatgaactgagtatttacgccagacgatgtaaagtccagcgcgggttgcgcactatctctcctgttacgtttcatccgtcagattcaggagcagacatggataacctctttcaccaaccgcagggtggcaatgagatgccacgcttcgccggccgcgccacaatgatgcgcctgccgtttattgaagatttacagggacttgacgcggcgtttgtcggcattccgctggatatcggcacctcgcagcgctcgggcacgcgctacggaccacgctatattcgcgccgaatcggtgatgatccgtccgtacaatatggcgaccggcgccgcgccgttcgactcgctgtcggtggctgatatcggcgatgtgccgatcaatacctacagcctgctcaaatcggtgcaaattatcgaagattactacactggtttgaatagttatccgctgatcccgctgaccctcggcggggaccacaccattaccctgccgatcctgcgggcgctgaccaaaaaacatggtccggtggggctcatccacgtcgacgcccataccgacaccaatgatgagatgttcggagagaaaatcgcccacggcaccaccttccgccgcgccgttgaggagggactgctcgacctcaaacgggtggtgcagattggtcagcgcgcccagggctatgccgccggcgacttccagtggggcgttgaccagggctttcgcctggtgcaggcggagcagtgctggcatacctcgctggcgccgctgatggccgaagtccgccagcagatgggcaacgggccggtgtatctcagctttgatatcgacagcctcgatcccatctgggctccaggaaccgggacgccggaagttggcggtctgagctccattcaggcgctggagatcgtccgcggctgccgcggcctgaacctgattggcgccgatctggtcgaggtctcgcccccctacgacgtgagcggtaatacctcccagctggcggccaacctgctgtacgagatgctctgcgtcctgcccggcgtgaagtacgcctgaggaagccgccatggagctgaaatgctttcgcactctctggggagtgacgaccccctggccgcaaacgctggatgaactgcagcgcgtcggctgctgcggcatcgaagcccgcgtgccgttaacggtggccgagcggcggcagctcgccgaccgcctgcaggcgtcggggctggagtatatcgccattcttttcagcggcggcggggtgctccccgcccagcatgaaacgcccgagcagcatctggcgcgcctgcagacccgcttcgccgaggccagcagcctcaacccgcgctttgtcaatttgctggcgggcaacgatcgctggccgctggcgcagcaggtcgattttctcggcaaggcgcacgagctggccgccgggtttggtttgacctgcagctttgaaacccatcgcgccacctcgctgtacagcccgtggctcaccctggagatcattcagcagctcccccagctgcgctttaccgccgacatcagccactgggtggtggtcagcgagcgcctgctggatgaccccagcgatgacttcagcgcctttatcgaccgcgtgcatcacgtgcaggcccgggtgggctacgaccaggggccgcaggtgccgcacccggcggcgcctgagtatcagccggcgctggcttttgccgagcgcttctggcaacaaatctggcgttcgcagcgccagcgcggctacccgcagaccacgctgaccccggagtttggcgccgacggctatctgcaccatctgccgttcaccaacgttccggtggccgatctctggtcgctcaacgcctggatggccacgcgccagcaggcccactttcagcagtttttatcgctcactgaacaggaaccgcagccatgaccgccgtgaagcacgcttttactgaactcccgaccatcgatatccgcgatctggccggcgatgacctcgccaggcgtcaggcggtggccgacgccatcggccgcgcggcgcgcgaggtgggctttttctacatcaccggccacggtatcgacccggcgctgatcgccggcgtccgcgaggcggcgaagcagatcttcgccctgccgatggaggagaagatgaactattacatcggccactccaaaagccataagggctacgttccggaaggagaagagatctacggctccggcaagccggaccataaagaggctttcgatatcggcttccaggcagcggatgaccatccgctggtgctcgccggtacgccgctgatcggcgccaacgagtggcccgatctgccagatttccgcgcgcgggtgctggcctactacgacgcggttttcgccctcggccaccgtctgttcgacgctttcgccctcgcgctcggcctgccggaagggtatttcaaaccgatggtgacctgcccgccggctaagctgcggctgatccattacccgttcgacgccagcgtcgaagatgttcccggaattggtgcacacaccgactatgagtgcttcaccctgctgctcgccgaccagcccggccttgaagttctcaatgaagaaagcgtgtggatcgatgcacctcccgtcaagaacgccgccggagaagaggcgttcgtgatcaatatcggcgacatgctggaagtgctcagcgctggcacatttgttgctacagcccaccgggtgcgcaaagtgccgcaggagcggtactccttcccgctgtttttcgcctgcgattaccacacgctgatccgtccgctgccgacttttctcgccgccggcgaagccggtgaatatcaggagctcagcatcggggagcatatgtggagccaggccctgcaaacctatcgctacctgcgcgaaaaggtcaatcgcggtgaacttcagctaccggagcgcgcgcgcggcaccaatacgtttggccatttgaaaaaacaggctcagcaaaaaaacccctaaccacccgtgaggatccatgatgactagcaccctgaaaaaaatctcgcgccatgtcgcgcttaccctcgccgtcagcgcctgtttttcccctgtcacccaggcggcggaactgctgaccgagggcgtctttaaggtgggaatggaggtcacctacccgccgtttgagtcctatgacagcaataacaatatcgtcggtctcgacccggagtttgccgcgctgatcgcccaacatctgcaggccaaaccgcagctgatcgacaccaagttcaccagcctgatcctcggcatcggcaagaaatatgacgcggtgatctccgggatgtacgtgacgccggagcgccagaaacaggccgacgccatcccttacgccctctccggcgcgtcgatcatcgccctgaagggcggcgcggtgcagccgaaaaccgaagatgagctgtgcggtgtgaaggtcggtctgcaggcgggcaccacctgggtgaccagcctgaaaaaacactccgatgagtggtgcctgaaaaacggcaaaccggccatcaccattcaggagttcccgacggcgccggaagcctcgcaggcgctgctgtcgaagaacatcggcgctcagcttgagattgccccggcagcgcagatcatcgtcgacaagagccgcggccgcctggcgataagctctacgcgcctggtctacccgctgccgctggggatctacgtcgccaaaggcaacaccgagctggcggaggcgatcaaggccgccctggccacgctgaaggccaacggccaatatgccgcgttgatcaaaaaatacaacttagaaagcatcgattaagacaataagcactgcgcaacaggagtcagtatggcgttcgattggggatactttttttcattgtttagcattggggcattctggcaggcgtgcgtgaccgtcatcgtaatcagcaccttgtcctgggggatcggcctggtggtcggttttctgttagcctgcgcgaagctctcggcgccgcgctgggtcaagatccccgtcgaactctatatctggttttttcgcagcgtgccgctgatggtgctgctggtgtttgtctacaacctgccgcagctgtttccggtgacccagccgctgctcggggtgccgtttatcgccgggctggtgtcgatgaccgtcaccgaggcggcctatatggcggagatccaccgcggcgggctgctgtcggtggccaaggggcagagcgaggcaggccatgcgctgagcttcagctttatcggcatccagcggctgatcgtgatccctcaggcgtttcgcatctcgctaccgacgctgatcaatgaatacatcaccatcattaagctgagctcgattctgtcggtggtctccttacccgagctgctgctcaccggccagcgcttgtatgcgcagaatttccttgtgatggagaccctgctggcggtagcggtgtactacgtgatggtggttaccgtcttcacctggctgttccgggcgctggaaaatcgtctcgatattcagcgtaagcgtccgcaaaccctcagcgaggcggaatgccaggcgctgcgccagagcctgccggcgctgacggaagagatcaaaacgccggccgtcaacggcgcgccgccagcgctcgatctgcggggcattcgcaaatcctggggtcagcatgaggtgctgaaaggcatcgatctgcaggtggagaacggggaggtgatcagcatcatcggcccgtccggctccggcaaaaccaccctgatccgcaccatcaacgccctcgaaagccttgatggcggggagatcattctctacggcgaggactatctgaagggcggagccatcgtcgacaaacgccagatgcgcgccggggtgcggcgcatcggcatggtcttccagagcttcaacctgttcccccaccgcacggtgctcgacaacgtgatgctggccccgcgctatcaccagctgcttgaccagccggtcgcccgcgagcaggccctggcgctgctcgaccgcgtcggcctgctggcccatgcccacaaataccccggacagctctccggcggccagcagcagcgcgtggcgatcgcccgggcgctggctctgaagccggacattatgctgtttgacgagccaacctcggcgctggatccggagctggtaggcgaagtgctgaaggtcattcagtcgctggcccgcgaaggcatgaccatgctgattgtcactcacgagatggacttcgccctgtcgatttccgaccgcgtggtgctgatggagaacggcgtggtgcaggccgatatcgccccgcaggtgatccgcagcccgctagaggccccttctctgcaacgaatccgtgaatttatgggagtacgctaaatggcaactgagcaacacctgcgccagcagttggccgccgcctaccggctggcggcgctgttcggctgggaggataccctctacacccacttctccgtgcgcctgcccggcgatggcgagccgcgttttttaattaaccccttcggcatgatgtttgacgaagtcaccgccagcaacctgatcgtggtggatatgcagggcaaggtcgtagcgggcgacgcgccagctaactcggcgggctttaccatccacagcgcggtgcatatggcccgggaagacgcccactgcgtgatccacacccatacgctgccgggaatggcggtggccgcctgcgaggatggcctgctgcagcttaaccagatcagcaccgagttttaccagcgcgtcggctaccatccctatgaaggggtggcctttgacctcgacgaacgggcgcgcatccagcgctcgctggggaataatatcgccatgatcctgcagagccacggcctgctgtcggtgggccgcaccgtggccgatgcgttttacatcatgtactacctgaaccgcgcctgcgagatccaaatggccaccgcccagctggcggccctcagcccgatccacaccatcgctccgcacctcagccagcacgcctgcgagcagctgatgggcgtggagcatgaacgtcaacaggtctggcaggcgtggctgcgccgtcttgaccgtctcgatacctcttacaaagactaacgcctatgtctgatatcactatcgtggtggattgtaacgacgcggatttcgcccgcgatatctgcgccgccctgcagcagtttcccgacgtcacggcgcttctgccccatcaccaggcggcgcgcgacgcccagtacgccagctgctggttcccggacccgcagctgttgacccgttcgccggggctgaagctgatccaggccgcgtccgccggggtcgatcatctgccgcccgcgctgttcgccagcgagatcccgctgtgccgggtgatcgatgaagattttcgccacggcatgttcgaatatgccctgtggagcgtcctgtggtttcagcgccatttcgaccgggcgctggcccaccagcggacccaaacctggaagctctatccccagcgcgccgccgccgacttccatatcggcattatggggctcggcgaaattggcggctatatcgccgaccagctggcccgcctcggctatcgggtctccggctggtcgcgcagtgaaaagcagttggctggcgtcacctgctatcgcggcgaggaggcgctcgacagcttcctcgggtcgcttgacgggctgattaacctcctgccgctcaccgcgcagacccgaggtatcctcgccgcgccgctgttcaaccggctacccgccggggcggtgttgatcaattgcggccgcggggagcatatggtcaatgaggatgtgctggcggcgctggagagcggccagctcgccggggcggtgctcgacgtcttcccgcaggagccattgccggcggacgatccgctgtggcgccatccgcaggtggtcatcaccccgcatatggcctctgcggcctctgccgaggtgatcgcccgccagctgctggagaacattcagcgccagcgccgcgggctgccgctgaaaaacctggtcaataagcacgccggttactgatccccggctatatcgccgctgctacgcttaataggagatccacaaccagaaggcaggaacatgaaaattgatttagcgggaaaagtcgcgctgatcaccgcctccacggcgggtattggcttcgccatcgccaaaggcctggcggagagcggcgcagaggttatccttaacgggcgcagcgagcagagcgtgaacgccgcgatcgcccggctgcaaaatgaggtgccgggcgcgaaggcgcgccccgccatcgccgacctcagcgacgccgacggcgcagcgcagctgctgcgggccgtgaccggtgtcgatattctggtcaataacgccggaatctatggcccgcaggatttctacgccaccgacgacgcgacctgggacaactactggcagaccaacgtcatgtccggcgtacgcctgtcgcgggggctgctcccggcgatggtcagtaaaggctgggggcgggtggtgtttatctcctcagaatcggcgcgcaatatcccggcggacatgatccactatggcgtcaccaagaccgcgcagctgtcgctggcccgcggcctggcgaaatatgtcgccggcagcggagtgaccgttaacagcgttctgccagggccaacgatttccgacggctttgccgaaatgctgaaagacgaagtggcgaaaaccggtcagtcgctggaggaactggcgaaagcgtttgtcatgacccatcgtccgagctcggtgatccagcgggcggcctcggtggcagaggtcgccaatatggtggtctacgtctgctcgccgcaggcgtcagccacctccggcgccgcgctgcgcgtcgacggcggcgtggtggatgatattctctgaatcccctttatgcaggggagccccctcccctgccgccttcccgggcgctaaaaagcgcaaaatgttaaaaaacagccgcaaagtcgcacaaagtgaacaggaacatgtattcccagaacttatgatatttgttttaagcataagttgtggtgttaatgtctctgttacgaagcttgcttttctttttcggcgcggcggtcgcggccgccctcgcggtactctgcctgtgggtggatattcgggtgtttggcaacgacatcccggaggtgtcgctcaccgaagtggtccaggagagcgtgctggccgttatcgtgctggttcatctgctgctggcgcggaaatatgcccacttgcgctatagcaatatcctcatcggcggcttctttctcgccatgctgatccgcgaactggatggcctgtttgatttactctcccacggcagctgggtgtggtttgccctgctggccaccgcggggtcgctgctgttgccgttgcgccatctgcgtaagactctgtcgcagctggcggcgtatacccgcacgccctattacgggatgatgatcagcggcctgctggcgattctggtcttctcgcggctgtttggcatgcacggcctgtggtacgccgtgctggaagagaactacgcccgggtggtaaaaaatacggtcgaggaaggcagcgagtcgtttggctatatgctgtgcctgaccgccaccctgggctacgcctgctactttcgcagtctggcgcaacaggcactgtcgccgcagcgctaatcgtggacgatagccaccgccgggcgtgtctgctggcggtggcgcgccgccgcggttaaccgcgaattttccacttccgtttgagaacctctttgtcctggctatccagccactggttcactttctccagcagcgccgggttatctttactcatcatatacaccttgttgctggcggtgccggcgaacggtgtttcgttagcaacgcagaacacgccgggctctttgctctggtaatagtcgccttcaatcagatcggtcaccatcatatcggccgttttctgccgcagcgcctgcaggttatcgacattgttctgcacgcggataatttgcgcctgcttgatgtgctcatcgacaaagctctggtttgtgccgccagggttgacgaccactttcacgtccgggcggtcaattttttccagcgaaccgagccgcggggcggcctggcagttggctaaggcgatttttccgttcgccaccaccggatggctgagggcgaaggcttgcgcccgcgccggggtctcggtaaccccacccatcgcaatatcaaacttgtccgcctgcagatcggcggcgagcgcgggccagctggtgtagacgaagctcaccttcagcccgagcgtgcgcccgagatcgcgggccatgtccacgtcatagccctgcagttcgccggcggcattgcgaaacgccagcggcgcgtaatcgcccggcacgcccaccttcagttcaccgctgtgctcgatggattgcatattgcgcgcctgggcgccgcaggtcattatcgccagcgtcagcgccagccccaccgtcagtctcatttcgccatccttaaagttatcgtttttcatgccagagtgaccggccgcatcagtcacagtatccgccgcgcgagccagggcattcatcctatttttaaacaccgggacatacaacccgacgtggggcaaaacgttaattaatcctctttctcgctgtgagcttgctggttgttttgactttcagtaaaatgccccgcagcgcattcatattttattcctggctatacgtttaatatattatttattatcgtttattttacttttctcttatgcgttaatagttgaatcttaaattataaccctctgattaataagtaaaaacacttcatgcaacaactttcgttaggatttttctaatgatcgtgcttatcatcttatttactcccctcctctccagcagtaatacttggttacagaagcagtgtataaggaaatacattatgattattatcatttccgccaataaattttttattaacggcatccggtctctggttaacatgaccatgagtgctcaacgtcggtatagtcaaacattgtttctggataatatttctgacgtgaatgataaaagtctaaccatagccagaaccattatcgtggactatagccacccggacattcaacaattagccgcactgctctatcgtaaaaaaaagatcattcatggcgatatcgtttttgtcgttaaaagtgagattcttgccgatccagtcgaaaacattatcataaactctatttcgacgatcgtgcttgattatatagatgttacccaacgactgcagaaatacttacagaatgcgtctgatcaccgctgtattaaagtgttcagaaaatcaattagctcgctggacagtcgtgtcaatattaaacttacgaaacaggaggactctcttctcccctatatcatctcaggtttaaataataagaaaattgctcaggccaccgaccttagcaatatgatgatcagtcactatcggagaaacatctaccagaaactcaatgtccgcaatattgcaggcctgtatcatttcctccactccctggaggggggataagttcgctttatggctatcacaacaacagagctaacggcttatgcagcgtcaatgagtatgcctggctattagcttcccagggtcacaacagaaggaattggctatgaaaatgaaatcactttgcctggcaatggtactcgtcggcttgacctcacactatgcctccgcggcggacggtacgctgtatttttcaggtacaattgtcaactcaacttgcaaactggcaagcggcaatgagaagggtctcattgaagttaagatgggcgctgttccgctgtctaaattaaaaaatgataccaatggcaccgggccagaagttggggtcaatattagcgtcaaagattgtgaagcgggcacgtactatattgtgctcgacggtgcttcagccaacgaggcgcctatcactaacgtactggctctcgatgcgggtaatcctacagctaaaaaagtcggcattaagctaaccgaccgcaataataccccggtcacgctcgataaacctttcgatcccaacgtcgacccgcgtattacggtcaatgccgatggcaccggtaccttcaacctgaaagcctattactatacctgggataaagacaacgccgaagctggcgacggcaatgcgaccgccaggtttaccattatacagcaataacgcctggccagggacggcacgacgcggataaggggtaagatatgaaaacgctgctggcagtgatcataggcgctttggcttttcagacccaggcggccattaccatcgatgcctcacgggttatttattcgggcaaagataaatcggccagtctgaaaattaacaaccgaagcagcaaaaactatatcgtccagacctggcttgatacgggtccggagacccccagcagcggcttacccattgtggcaacgccgcccctggtcaaattacgccccgagcaatcggcacaactgcgctttatttactcaggaaccggtcttcctgccgacagggaaagtctgttttgggtgaatattcaggaggtccctcctgcgcctgaggaaaataatatcctgcagttcgcgattcgcacccgattaaaactattttatcgcccgcaagggattgccacatcgctgcccaaagccgttgaaaatctgcagtggcagcaaagcgctaacacgttatcttttactaacaacagtccactgcatattacggttattaatgccgaggcgatcgacaacaaaggcaaaatctatcctctgaaaaactttatgttgctgccgtacagtcatcacgctgtcaatatcgccagcatgcagcgcttgcataaaatgaaatatattaatgattacggcgccgttgttgatattccaataaaaaaataaacgtcgcacctctttagggagatagagtgatggacgatagtaaattacgctattttgccagcgcatggttaatctccatcacgttaccggcagacagcgcggaacgctataatgcccagtttgtgaacggcatcgacccgctggcttttaatcagtttgtcgccagcgatggcgacgtcatgccgggcacctatgacgttaatatttacattaacgatctgctggtggatagccgccccgttcgcttctcagaggatagcgcacacggcgggttggccccctgcctgagcgcggcggaatatatccgctatggcgtcaagattgacgatgaccaccagccctgtttcgcgctgtcgcagacgatccgccaggcagagcaacagctggatatcgctaatcatcggctgatcatacatatccctcagcaatatattgagcactatcctcgcgactatgtttcccccatgcgctttgatgaaggtattaacgctgctttcgtcaactacagctattctaccgatgccaataatggcgacgggggcagccaccagtaccaatatctttcgctaaacagcgggatcaatattgcatcgtggcgattgcgcaataatgcctactggaataagttcagcggccaggcggataagtggcaaagcatcgccagttgggcggaaacgaacatcattccctggcgcagccggcttgtcgtcggccagaccagtaccgacaacagcgtcttcgatagcgtccagtttcgcggcgtacagcttggcaccgatgtcgaaatgcgccccagcagccagaccggcttcgcgccggtcattcgcggtgtggccaacagcaatgcccgggtggaagttcggcagaacaactatctgatttacagcgagaacgtcccagccggtccctttgagctaaatgatatcagcgccgttaaccgcagcggtgatttctacgtaaccgtcattgaagccgacggtagccagacgacctttactgtcgcctacaccaccctgccacagctggtgcgggcaggccaatggaattatcagctgtcggcgggtaagtatcatgacggtgctgacggctatgcccccgccctgatgcaaagctcgctctcttatggcctgaataataccttcacactatacggtggcgcccttgccgcggagaactatcgcgccggcgcctttggcgtcggtagcaatctgggggagattggcgccctctcagccgactatacgctggcgggaacgacgctggcgaatggccagcgcaagcagggagggagcgtgcgttttctgtatgctaaatcctttttatcaagcaagaccgactttcaaatcgcgggctaccgttactcaacggcaggttattatagcctcagcgatgcggttaacgagcgtcgacgctggcacaatggcctgtacgaaaatgattactggccctctgacgaagacgaaagctggcaggcaagcgctccccaacactattacacgtcctggttttataataaaaagcatcgctttgatatttctgcccggcaaactctcggtaagaacagcgctttcttccttaacttcagccagcaaaattactggaatagctcaggaagcgatatctcgctgcaggcgggctttaacagcactatccataacgtgaactatggtctgtactatcagaatacgcgcagccacttcacccatgacgacaatagcatcacactgcgcgtttccatcccttttactctgcaagaaaaccgccggatcaataccgcatttaccctcgcccacagtaaatcgtctggcacgtccgggcaggctggggtaaacggcacgctgctcgatgatggtcgcctgagctgggccgtcaccagcgcctatgatgacaccagccatagcaccaacagcgccagcctgggttatctcggccagtacggtaatctgtataccggttacgcctacagcaaaagccatcgtcaggcgagtctgaatctgagcggcggcgtggtggcgcaccgcggcggcgttaccctctcgcaaccgctgggctcaacctttgcgctagtggaggccaaagacgctcagggggtagggatagagaatcagaccggcgtgcgcatcgatcccttcggctacgctgtcgtaccacaaagcgttccctatcgggtcaattctgtcgcgctcaaccctcaggacttcgatacctttcttgatgtccctaacgcggtagcggataccgtgcctacccgcggggcaatcacccgggtgcgctttgatacgttccggggatatagcgtgctgatccataccaccctcgccgacggcagctatccaccattgggcgcacagctctatcgcgccagtgggatcagcaatggtctggtcggcccgggaggagaagtttacgtcagcggagtcgattcaggcgaaaagctgcagatgaaatggggcgaaacgcaccagcaaagctgcgaaatcaccctgcccgaactgcgccaggagcctcagcaggcgacggcctggcgtgaattatccttaatctgcacagtaaccccctcgaggtaattatgcgccgacttagcgatacgttatttctgacatggctttccgttctgttcatgctgagcgccttcccggcgcaggcgctgacctgcaagaccacctcgtccacgatcagcgaagtcgtgaatatcgagagcatcattaaagtctccagcagcgagcttattgccaataaaaagatatgggtctccagccctattaccgccaccttcagttgcgaagataccgataattttccgaacggtgaaagcgcctatttctggctggatccggaaaataaagccagcagcttgcccgactttatccaggtaggcattacttacaacggcatcgactatctgctacaaaataaaaaatcggtggagattggcccggcgacgctgtgtgataaaagcgggaatacctgtaagtccccggccattgggcagacattcagcctggtttaccaggtctatatcatctcgacgggccgcagagtgaccggggaaggtaaaatagacgataacctaaaattgtcgctttttcaggtagatggccaaggcggtctacgcaacggcaccgctggcgccaactataatcttttcattaccggcctgaaccgtatcagaacaatggcctgcgtccccacggtatctatttcgccaagcgaaattaactttggcgatattcctgccggtaacgcccgaccgggctactatgaaaaaacacgcccctttaccgtcacctatggtctggtcaagcagggtaacggcagtgattgcgggaccgaacctatgcttgctacgtttagcaccactaatacgatacaggagagcgccattattttgccgcagccggacagcggcttcggcattgccatctcgccaaacgccagcatgcatccccttattgagatgaatgctccgattcactttacgctggcaacgggcgcgaccctcgcgagcacctatacggcggggctgctctggttgtcgagaacgccgaagctggggcctttttccgcgaccgccaaaatcaccgtgacctttgaataacgccgccccaggctagttatactccagggcgaaagtcaccatgctgttggccgtaccggctcccaccgtggcgtcagtctgcacatactgggcgttgaaattgatcgcctcggcggtaccggcgctggcgccggtcacccttttcaggatcggcaagttgctggcctcattgatcttaacgctggtgccgtcgggcactgccgcaccggggttattgccgtaggtcagcttcacgccgacgccgctggcgctgttgctggcctggctcagggccagggtatcgctctccacgctgacgccgaaaaagccgatgcgcacgtcggtcggcgtcggacagaagaccggaatcgaaaagcgcttcgcctggccgccggtagtccctttgccatgaaactccccccggttaaccgtacccagactgacctggatcgtcgatgtcgctacctggcagctgccgctgctgccaatgtccacattcagggcggcgatatcgatgctgaccggcgcgctggcgacaaagctggcgcttgcgctggtctgctgttcaatggtcatctcccccacctgcggcagcggcggcgagttggtatgcgtcccgtccgccagttgcaccgttccggttttatagaaggttaccgcaatcctcaccgtggtttgctgctgcgtcatcagcgccgggagcgtcgcactgtcgcatatcaccaccgactcgccgccggcggagtggctgccatcgacggcacgcatcgggccgccggcgcactggaagctgagggcgtaaccaatgccgtcgatagcgctggggtagacatgctgtccgttaatcaccatcggcgagccgccggttttcagctgcttatagacgatgcgtttggcgctcgccgtcggcagctgcaggtcgcaggaaaaagggatcccgctgccgttatccgccatcgcgctggtcatctgggtattgaccggcagcgtgggtaaatacttgatattaggaatattgaccgtggtctggccgatatttgcgcggcaggtttcagcccgcacgccgggaagataggcgctcagccccagcagaaagaggaaaggaagtagacgaaaaacagatttcatagccgcctcagcgtgtctggcacagtccggagacggttttcaccgtattcagactctgctgtgggttatccggaagatgaaaatgcagcgtgcagctctgcgactgattgttgacgatccaactcaccgccagggttccctcctgcggcacgccgctgagatacacctggccgccgtcggccaccataccgcccggcggattgccgctctcctcctccttgaccagccgcgcactggcgccaaacggtagcggcccctgggcattgcgcagggtaaacagcacccggttgccaatgtgggtctggtagttggccatcaccaccgcgccgccgccggggatcacggtctgcccctgctggtcgacgtcggtgtcgtcggccatcgactccgtatcgagggtaatgacatttttccggtaggcggtcagggagggcaccacggcatagccgcgccagtcggtgtgcacattgttgccgttttgcaccgccacgccggcggcccccggcgcccggacgatggcgaagctctcacccaccgtctggccgaaggtgacgccgtgcggatgcgcgaccaccgagccggcgcctccccaggtcaactggttgctggcggcgtcatggcgatagccgatctgggcgttgccgaagccgccgtggtagtccagggaggcgctgctgttgctgcctcgtccctggttgccataaccttgctgaaccgagtagaacagatttggccgcgtcggcaccgcgccatacagcgacatctgctgcgaggtatagccattgctgtccgaggtggtgttgtagctcaccgcgctgtcggacagcggaccacccagcggaatattgatattgaatgaccaggagcggtcatttttttgctggccgctggtgcgggtgtagtaatagcccacaccccaggagatccctttccaggcgctgtagaacccaaggtgcaccgtctcatcccgactctgccgatgccagtactcctgcgaccaggcggaaaccgccagactgcccaggccaccaaggctttgcgacaccgacagctcttcccggcgacgccggttgtctacttgcccctgggcgctttcaagggcgctggcttcggcaaaatcgtaatagccgcttgacgagtagcgatagctggcgaggctgaacgcagtgcccgagctgacaaaatttttctgatactgagcgcgcagcgaatggcccgtatagcgcttgcccgacggcgtacgggtgacggcctgggtgacatcccctcccagcgatccgaactcgccaaaaccgcggcccaggcccagcgcccacgcctgatagtcccgggccagctgcgtaccaccgtagagggtgaatcccgccgtcaaaccgtagtacaaagtgccctgcagaaattccggcgagcgcaccgactcccccccggagtggtagcggccggcgctgagactgaatttgccgcgcccttcgcgcagcatatatggcaccgcggaatagggctgggtaaaggtacgcaccgcgccattgctctcggtcaccttcacctccagatcgccgctctgcgaggtggggtagagatcgctgatggcgaacgcccccggcgacacaaaggtctcgtagatcacatacccgtgctgagagacggtcactttggcattgctgtgcgccacgccacgaatggtgggggcaaagccgcgctggctgtccgggagcatttcatcgtcagacatcagctggacgccgcgaaactgtatgctgtcaaacacatcgccggtggtataggtatcgccgatccgcagcaagctcttcagcgagcggacatcgcgctgcagccaggtgctctgggtatcccagtgccggcgctgctggtcatactgcattgaggagatgttgcgcagtcgccaggcgcccaggttgaggccgctgcgtaaattgagatagtttgagcggctgctctccccttcgtcggcgttctttatttgcgcgccggaaaaatagtaatcgacaaacgcggccggcacgccatcgtcccagcgcgacggatcgacatagccgcggctttgcacgttcatcgccgcctggggaatactcagcgtcaggcgctggttagcgaagctgaaccgactgctggcgtcgggaataaacttctcgatccgggtgaaggtttcgccttcatgcagcgcttgaaaggcgggaaacgcgctgacgttgacgccatactccgccagctgaccgggcgtcagcaccgggcgcagctgcccgccatcgtcaacaaacgtgatatcagcctgacccagctcctggtcattaaccaccacggtgacaggataagtccccggctgctggccgccgggtttggcgaagtagtgcagatcggaggtttgctgctgcgggtcagcaaactccagcgccgccgggtcaaaatagtcgtcggccatcgcccggctcaacggactgagacaaaacatcatcgtcggcaccgtcgccagcgccaccgcccgcccggcggtaacgggcaacaaggcatactcccgcaccctggctgttgttattcttttcatgctggcgccgtccggtaagctcatcaaaaaggggaattactgctgggcgaaatcgctgacgccgccgtagtcgttaatcgcccgccatttgacggtgccgtgcccgctcaccggccacgttttctcgccgaagggagccaccatgccgggatcgtcgatgctttgcccgcccacttcgacggcgtaaaaagagacgaagtagggagtgggatttatcaccgtcagccgaccgccggactggctaaacttcagctgctgccaggcctttgccgggtcgcccgccaggtcgttggggcgatagaagattttgaatttcgatttaatattcacctgcagcttattcacctcgccctgaggcgtcggggcgatacttttgacgttcagccagaagaccgattcacggtcgcggggcagcgaggcgccaataaagttaatccgcagaacgttattttgctccggatcgagacggaacaagggcggcgttacaatgaagggcaccctggccttatcgttttccgcgtaattttccacccacgactgcaccagatagggcgtatgggtatcggcattggtgactgaaatagcggcttcacgcttcccttcctgataaatcacacgggttccacccatgacaataccggcctgcgctgccgtggtgcacagcagaaaagccgcaacggcaattattttcttcatcatgacttaccatcaggtaaaagttgaacagacaacaaaataaagcagtgaataacagagccagtactcgacgggataattagcaaaaacaactataccgtcacgaatatatttcgtgacttcatgacaattaacactttagctatctgtaattaatcaagacgcagtgggctgactctgaataacgcgcaattagatcagttataaatcatattgaaattagctgtaccgtcggctttacctgccgtcacggtcgccgcggtggagatatagtcggcgtaaaattcgaggtcggcagagccggtgccgccgctggtacccggagtgaccgtctgtttggctgacgttttaccgaggctgacagccgtcgaccgatcgtgctcatacagcttaatcgctacgccgctggcgccgccgttgatggccagcagggagttatcagactgatcgcgcgcgccgtcaaacagcacggcgaccgtagtcacgctggccgggcaatctttcactttgatatggaagggggttttggtggtttcaaaaccagtgccggtaaaatagttgctggcccatttgcccagatcaaccttctggccattagaactactatcgacgttgcaagagctgtcggtgattgacccattgaagatgacctgcccgccggcgccttccgaactggtgcccgagtcaggattgatagtgttggccgcggtagcctgcaaggctacgccagaaagcagcgctcctatgaggatggttataaagcgaggttgttttttcattatttatctcatcgttaacgaacatattttccatcatcgacaatagccctaaagctatcgcgaaacggctcgtcagctcctccctgtaaatgtacgttgcgttccttccgcaggatattaggcacatccccctctactctgccttatttcgccaatagatggccatgaataacaaacagaagaaaaaagagttattttgatgtgcgaaataaatatattacccgaagtatcaaaaggcaacccgggaagatgttaactataagttaatagctatgctcgccatatatttaatttttgaaatggcttttcaatgttaatttacatatctatacaaaagaaattcaaatacctttaaacaacaacagatcaattcaattaacaaatttaaagacaattgttcaaaaattcgtcttgttttattgtgcgctcgtcagagcgtacacaaaaattaggaattttcctggtattaatattcataatttctacacaaacgacgccagggtgcgccacctccacccgctaatcccttattttggaagtttttttattttcaagtgaaagccaatacataagtgacataaatacatgggcgctgccgccggcaaaataaccaccctcttcgaatggttattttgaagttaaaaaaaatccgcaacccgaatggattgcggactgaggattggtcagaaatgagatggacttcagaacaggcccagcggcgcggtgccgtagctcaccagcaggtttttggtttgctgataggcatccagcgccatcttgtgcgtttcccggccgacgccggactgtttatagccgccgaacgccgcatgcgccgggtagacatgatagcagttggtccacacgcgaccggctttaatgccgcgacccatgcgataggcgaggttggtatcccgcgtccacaccccggcgccgagaccaaactgggtctcattggcgatagccagcgcttccgcttcgtccttaaaggtggtcaccccgatcaccggcccaaagatctcctcctggaaggagcgcatatcgttgcgacctttaatcagcgtgggctgaatataaaagccattatccagcgccggcgcgatagccgcccgttcgccgccggtcagtatttgcccaccctcttcccgggcaatctgaatataggagaggatcttatcgaactgctggcgggaagcctgagcgccgatcatggtgtcggtatctaacggatcgccgcggcggatctgcgccaccttctccattacccgtgccataaagggctcatagatggattcatggatcagcgcccgcgacgggcaggtacagacctcaccctggttgaagaagccgagcaccagcccctccaccgccttctcaataaattcctcttctccgtccatcacgtcggcgaagtagatgttgggcgatttcccccccagctcgacggtgcaggggataatattttccgccgcgcaggcgagaatatgccgcccgaccggcgtggagccggtaaacgccagcttggcgatacgcttgctggtggccagcgcctcgcccgcctctttgccgaaaccctgcaccacgttaagcaccccggccgggaacagatcgccgatcagctccagcagcagggtaatgcttagcggcgtctgttccgccggtttgagcaccacgcagttccccgccgccagggccggggccagcttccacgcggccatcagcagcgggaagttccacgggataatctgtccgaccacccccagcggttcatggaaatgataggccaccgtggtttcgtcaatttcggcggtactaccctcctgggcgcgcaggcagccggcgaagtagcgaaaatggtccaccgccagcggcaggtcggcgttaagcgtttcgcggatcggtttcccattgtcccagctctccgccaccgccagatattccagatgctgttcaatacgatcggcgacctgcagcagcagcctggagcgctgttgcactgaggttttaccccacgccggcgccgcgcgatgggcggcgtcgagggcgaagtcaatgtctctggcatccgagcggggaaactgcgcaatgttgctgccgtcgaccggcgaagtattcataaagaattcaccgctcagcggctcgacaaatctaccgtcaataaagttgccgtaagccgatttaaatgaaaccacggcgccgggctggccaggatgtgcataacgcatcgcaaatctccttctgtagggttgagacgcagcggcatattgattttttaaatttgccgccgaacgcttctcactgtgcaggggttatgccagttttttattttctttaaatatttttatttattaatacgttgccttcactaaccgagcagatggtcagccatctgtcgcacgggtttccacttatgtgttgcaaatcgcaacaccaaataaaccaaatggctacaatattgcaacacagcaacatcgacccagaggtgccctgtggcaggcaatccctttcttctcgcaccagaggttaatgcgaatcccctgctgagcgattcgtggtctcgctgccagcgctacgggctggatcccgccaccgaggattttccccgcctcggcgccggcgagctggcggaccggctcgccagccaccgcggcctgcagcagctggcgcagccggtggtggaagccctgtcgcgccaggtcgcagacctgcagtcggtggtgatcctttccgaccccgacggcctggtgctgcatactctcggcgatacccaggcgctgcaaaaggcccagcgcgtggcgctggctcccggcaatctgtggagtgaaagcgggcgcgggaccaacgccatcggcaccgcgctggcgattgacgatggctgcgagatcgatggccgtcagcactttcttacccgcaaccagaatctgtactgcgcggcgatgccgctccagcgaccggacggaagcatcgccggggtgctggatatctccggcccggcgaattttccccaccagcacacctttggctgggtaaaagcggcggcaaagcaaattgaatatctgtgggtgaaacagagtatgcatcctgagcagtggctgatgagcctgcaccggcaggtggacaaactcgacagcgtcgaggagctgctgctggtcttttccgacaacgtcctcaccgccggcaaccggctggcgatgcgcgagttcggcctgagcgcggcgcagtttggccagctcacctttgcctcgctttttccgacgctgacgcaaacggcggtcagcgtcccgctgccgctgaccacgccgcagggccgctaccattatcgcctgcgggcgcccacccgccgccgggtggcggtaagcgccccgccggccatgcatctcccctttaccagcccgcgcgaaggcgaaaagctgctgcggctgctcaacgccggcatcgcgctctgtattgagggggaaaccggcagcggcaaagagtatgtcagccgcacgctgcatcagcacagccgctggcgcagtggcaaatttgtcgccatcaactgcgcggccatcccggaatcgctgatcgaatccgagctcttcggctaccagccgggggcgtttaccggcgccagcaaaaatggctatatcggtaaaatccgcgaggctgacggcggggtgctgtttcttgatgagatcggcgatatgccgctggcgctgcagacccgcctcctgcgcgtcctgcaggagaaagaggtcgctccgctgggcgccagccgcagcgtgccggtgaatttcgccttgatctgcgccacccaccgcaacctgacccagcgggtcagcgccggagaattccgtgaagatctgctgtggcgtctgcgggaatacgccctggcgctgcctccgctgcgcgagtggccggcgctggaaacctttatcgccaccctgtggcacgacctgggcggtgcttcacgccgggtgacgctttcaaacgcgctgctggttcacctcagccagctgccgtggccgggaaacgtacgccagctgcagagcgtcctgaaggtaatgctggctctcgccgatgagggcgacacgctgacgcccgacgcgctgccggaggcttatcgcgccgcgcctgcgccgttgccgcgcgggggattgcaggcccatgatgagcagttgattgtcgataccctggccagggtcaacggcaacgtcagccgggcggcgcagatactgggtatcgcccgcagcacgttgtaccgccgtgccgcccgtgccggacggcctcgtcgctgaggctatggcgtaaagcgcgccggtagcttgcacgctgtcggaaaacctccgccgccatagatggcggttatttctctctgcgctaaccaggtgttgcggtaagaggtagcccttcccgcagggcatcgatcgccgcccgcgttttttgcggcagccacggcccctccggccataccgcgtggatggcgaaacgcacctgagcgctgggcgccaacacctgctgcaatgtcccatcggcaagcgcctgcgccaccagccagtccggcagccaggcgatgcccatcccctgctgcactgccgccgcgatggcggcaaaatcatcctgtatcagccacgtctgcggactgaagcgcacttcgccctgctgcgggtcatacagttgccatttttgcagctggccgttgtgcagatagccgagggtacggtgctcgttcaacccggcaatagtctgcggcgctggctgctggcgcaggtactccgccgccgcgcacagcaccataccatgctctcccagcgcacgggcccgcagcgacccggtatcggccaggctcccgatacgcaccgcaagatcaaacccctcctccagcagattgacctgccggtcgctgtagtggagctcgagcttcagtaacggatagcgctggctgaggcggaacagcagcggtgccacgcagcgctggccaaacagcaccggcagcgacacccgcagccgcccctgcacctcatctttgccgcgctgcagcgtctcttcggcctcgcggatgcgctccagcgcttcccggcactggcgatagaattgctccccctcttccgtcagcagttgccgtcgggtggtacgctggaataacgccacgccgagacgcgcttccagccgggcaatggtttttcccaccgccgaacgcgtcacatggaggatcgccgccgcgctggcaaagttgccgctctcgaccacggtgacaaataccgggatcgcattcagatcgtcgcgcacagattggttccttacgggatacaataaggaaaaataatgtcactcctgagacaaaaaagacagtgttagtctttgcttctatctttcatttgaggcactcatcatggctaacgttctggttttaaaatccagcattaatggcgaaacatccctgaccaatcagttgattaacgaatttctcgcggcgcgccaggcggcgggacacggcgatcggctcatcgaacacgatctcagcgccatggcgctgccaacgctggatcgccccctgttcgccgccctgcgcggggcagtggatccgcagcctgctatccgcgaggcggtcgccctctccgaccagcttatcgccgagttaaaggccagcgacctgctggtgatcggcgcgccgatgtataacctcaacgtcccgaccgatctaaaaaaatggttcgacctcgtggcgcgggcacgggaaacctttcgctacaccgagagctggccgcaggggctggtggagggcgtccgggcggtggtcgtcagcagccgcggcggtattcaccagggagaaactaccgatgccgtcacgccctatctgcgcgcggtactggggctgatggggatccaggaggtggaatttatctatgccgaagggctggacaatcgcccgcatggtcgcgacgccgggatcgccagcgcccgggcgcagattgcccggctcgccgttccggcctgagtcgtggagaaattgtgctggcgctggcggcctttttattttagagttatctaaatttagacaaagctaaaataaatgaccacacctgaagacctgcaggcccgcgccggagaagccgccgcgctgatgaaagcgatgagcaatcctcaccgattgctgatcctgtgcatgctgtgcgatgcgcccagggccagcgccggcgaactcgcccgggctacagggctgagcccctccgccacctcgcaacacctcgcgcggatgcgtgacgaggggctgatcgacagcgagcgcgacgcccagcgtatccactatttcattactcaccctgcggtacagcaggtgatcaatacgctgaaaacgctctattgcccgtgaggatcctatgaccatcgccaccttaactcccgccgagacccaggcgcagattgcccagggcgccagactgattgatatccgcgatgcggatgaatatgcgcgcgaacatatccccgatgccgagctggtgccgctcgccactctgaccagcggtgcgcccctcaatgcccgggccggagagacggtcatctttcactgccaggcgggttcccggacgcagaataatgcgattcgtctggccgcggccgccgcgccggcgcaggcctgcctgctggcaggaggaattcaggcgtggaaagccgcggggttgctggtagtggaagattcatcgcagccgctgccgctgatgcgccaggtgcaaattgccgctggcgtcctgattttactgggggtgctgctgggctataccgttaacggcggctttttcctgctcagcggcgcggtcggcgccgggctcaccttcgccggcgtaaccggcttttgcggcatggcgcgtctgctggcgaccatgccgtggaaccggcgccagggggttaaaacgcgctccagataagccaggcaatgccgccgaagagcagccatttgacgatgtaatagaccgtcttattccattttttcaaccgcttaccaacaatacggatctggtaaatatagcgaaacgcccggttaatcccgccggtgcgatcgccgatatcgttgggcgccgaagcggcgctcatcagatgacgtcccagccagtggttaactttctgcgcccagcggtagcgcatcggccgttcaatatcgcagaacagaatcaggcgattctcaccactggtattttccgcatagtggatataggtctcgtcaaacagcacgccttctccatcgcgccaactgtaacgctggccatccacctcgataaagcagcggtcatcgttcggcgttgccaggcccagatgaaagcgtagcgagccggcgtaggggtcacgatggcgcggcagacggctaccgtccggcagagtggcaaacatggccgctttcaccgacgggatatcgcgcagcagcgcggtagtttgcggacagagctggctggcggaaggatgggcatcctcataccatttcagataaaagcgtttccagccggttttgaaaaatgagttaaacccggcatcgttatatttatcggccgctttaatctgctccagttgctgaaggtggagaccttcgtcgcgaataacctgccagttttgctgcaatatcgccagctcgggaaacatctccggccgcagataaggcgtattcggcacgcgggaaaataaatacataaatccattcagcggcgcggtaaatgtggaatggtcggagagctgccgccagaaacgatagcgcacccgtccgcggtaatggacatacagtacagcaataacaatgatcaacagaatgatatacttcatggtgtctttcctgacctgattggtggtaaccctaccctcgccgtccccctttctcagcagcggtatggcgccagcaaaacattaacaatgttaatacatataactccaaattgttttaacaaaaaacagcacgcccggtgttcagtgagcgggcgttgagctatggtttaggtttatccatggtgttaacagtgaggagtgaattatgtttgctgtcggcgatctggtacaaccccgagcgggcggaccaaaactgaaagtggtggaagtgcaaggggagcaactggtggtggttcaggccgcacaggagcagggagagcgctattcgctgaagtcggacgaggtcacgccgtatcaggaagagggagacttcggcgtctgctaaagcccctcgcttaaagtcgtaaggccaggccggtgggtctctcaccaccgggctggcgctggcccgaaggcgttaaattaaaaagctatccagcgatttaccctgggcgacagcctcggcaatcggcttcggcattcttccctgtccggtccaggttttctctgcgccagtatgatcggtataacgatatttcgccgggcgcggttgacgctttttgcctcccgcctttggcggctgaatatcggccaccagctcgtcaggagaaataccgtcggcgcgcatcagttcaagccaggtattcactttctcctgatattcagcctgctgctgagctgcctgctgctgttgcgtacgtttttcttcagtgacgatcctgagcttttccagcatctcttcaagcacgtcaatggagaattcacgggacagggcacgcagtgaacggatattattcagtttgtgtaacattgaagacataaaattaaaaaattccaaatagcaaattaaaagatacaacgcggcaagtgtaatagaaacgtttatttatttccagccttcggctgtccagataaatatataaggtggatattagcggttatcccctggaactatattggcaaatacctgagcctttttcataagcacaggcaaaaaagagagtgaataaataaaaaaggcagaatgacgggaaaaaccaccgttctcgccaggaatattagctttatggtcagcgggttacctgctgttcatacgtggccgcactgatacatacctttggccacagtgaatagttaatcagaaaatgggaataaaacaacaattcgcaattcagagtttttcaccataaaaacgcgacttacggcataaaaaatcctaaaagagagcggaatcacacactcgcgtgatgttgcgccatggttggctatcaggcgccgttccctcggccagtctcgatttcgcaataaagagtaacacattgataaatattgatatttgcaaaaacaggaataaaagtagcgtaacgaacaaaaaacaaaccagcgcagagtattttatcgacaaaaaggcgataaataaaaatttatagctagttgccacttttaatgcagagatatactctacgcacatcaaaacaggcagcccaaaaacgctataccaacgcgcatttttcggcgttaatgacttcattttcgaggagcactccgatgttctctgcgcactcccgcttgcggcatgcggttgcagacacctttgcgatggtggtttactgcaccgtcgtcaacatgatgatcgaaatttttctctctggtatgacgtttgagcagtcgttatcgtcgcgtctggtggcgatcccggtcaacattattattgccgtaccctatgggatttatcgcgatttcgccatgcgtcaggcccggcgcatcagcccagccaggtggatgaaaaatatggccgacgtgctggcctacgtcacctttcagtcgccggtgtatgtcgctattctgtggagcgtgggtgctgactggcaccagattgtcgccgcggtgagctcgaacctggcggtatcgatgatgatgggcgccgcctacggctacttcctcgactattgccgccgcctgttccgcgtggcgccctatcagcaggcgaaggcctgaccaacgcgttagcagcgactggctctgccagtcgcctcttcccgccagcccgcctcgcctggatccttaaatgcctatcggcgtattaattcgtcgacattgccggctgggcttcgccaaatagcccattcagaaaacgctcaagcgccatgcgtgagctaaatccatgcggaataccataatgttgttgcgcatccccggctaaatacagcggaaactgttcataatgatcacaggttttgatatctgaagccggttcggccagcatattgctgcgctcttttaacgccggatgaataactaacgctgttcgccccatgcgcgcttcgcggttcacataaacataattatcgccgcggcgatagccgtacgctttttgcgtcacaacatccatggtgaagccggctttttcaagaacacgcgccacctcatcgggtcttaaatacatactgattcctcgttatcttttaccgcacattgaccttaccttattcattaaggactgtgctttcggaaaattccagaaaccacgacagtaagcataattcaaaatcttgtcctacacttaactcactcgatggaattaagggagataacgatggctaaccatgtgaaccgcaacaattttgacgagaacgccgaagatattcataacgatgtcagccaattagcggatacgctggaagaggtgctgaaatcatggggcagtgacgccaaagaggaagcggaagcggcgcgtgtcaaagcgcagtcgctgttaaaagagactcgtgcccgccttaatggccacaaccgggtgcagcaggcggcgctggatgcgcgccaggcagcgtgcgatgcgctgggctgtgccgatacctacgtgcgcaataaaccgtggcacagtgtgggcgccgccgccgccgtcggggtatttattggcgtattgctcaatttacgtcgataatagcttaagcgtcggctgccgccgcgcgattggcgcgcggtagcccgcgagctttacggaaggcaatgaagataacaaatacgcgtcagcccctgcgcgcctctggccgcaggggtttttctgcttccccgacttaagcgccatcaaatcgcaatcgcctctctcagccgtcgggcaagtccgtcagccatcgccggcgaacgtatattggtaaaactcatcaataatcccccctcgcccgcgtgcgaatccgccagtcgctcagcgcctgcaccgccagcccggccacaaccgcccgccgcgcgagcagccgatcgtcgccgctgaccgacataaccagttgaattccccccagctgcggcgtgacctgaaagccctgcgcctgcagagccgactccagccactgtctacgctggctatagctggcacgcattttcttcaaatgacgccaaaaatgtccctgctggataaaatccgccagcgtctgctgccacagggtgggaacggtgcaggattggcgctccgcggtctggtgaaaacgcgccaccagcggggtcggcaccaccagccaggcggtgcgcagcgccgggaacatcgacttactgaaggtgcccgcgtagatgaccctctgcggcgcatcaaggcttttcagcggcggcagcggtttgccgtgatagcgaaactcgctatcgtaatcgtcctcaatgatccacgcgtcgcgctccgcggcccacgccagcagctggcggcgtcggggaagcgacagcgcgacccccagcggactctgatgggctggtgtgagcagggcaaatcgcgcctgcgggtgatgacgctggccccagccgacgtccatcccttcgtcgtccaccggaatcgcatccaccgccagctgcccagcctcgacgaccggccggataaagggataccccggatcttccatccacatatgctgtcccggctgcgccagggtacgcaggataaggttcatggaggcggcatagctgccggtgatcaacacctgatccggctgacagtcgatactgcgcgacaggcgtagataatcgacgatagcctggcgcagaagcggatcgccgccgggatcgccgggtgcaagatcgaaccgcgactgcgtccgcagccgacgccccatcacccgcgcccactgcccgcgcggaaagagatccagcgccggcagccccatctgaaacggcagcggctccgtcggcgcggccggttgcactggcggtaccggcgccagctggcgcgggctgagccgctcgctgacaaaggtccccgcctgcccacgccgttcgagccatccctgggcgaccagctctccccaggcgttttcgatggtcgcccgggaaacgccctgctcctgagcgtacacccggctggcgggcaaacggctgcccggggtcagttcgccacgttcaatcgccaatttcaactggcgggcgatacgctgataaagcgggaggttaatcgcttccattatggtctgcttttttcatcacaatatggctatcttttgcagtccattatagtgctattttggctgccgtcttagagaggagaacaccatgaaccaattacgtcagccattcagtgaactgagcccggaagtctataaagggctgatacaggccagcatcgcgctggagaaaagcgagctgggcaacgccctggtagagctggtttatttacgcgtctcgcagatcaacggctgcgccttctgtcttgagaaacatagccaggcgctgcgcaaaggcggcatggcgcaaagcaaactggatgcccttgcgggctggcgggtaagcgcccactttactccggccgaacgcgcggcgctggcttgggccgagtcggtcaccgacattgccaccagccatgcggaagatgaggtttaccagccgctgcgcgaacattttaccccgcgtcagataagcgatctgaccttcgccgtcagtctgatgaacgcctttaaccgcctcgccgtggccatgcgcctgtagttccgcacagcctcccccctcctccgccgatctatcccggcgggggactcgcttgccaaaaacgctatatattgagtggttgaagttttaaataactacatctagtatttccttatcgaatggcccactacgttcgacgctatgtttagcgccgtgctgttatcttaaatggaaatacgaatcatgcgcattattatttacactcgaaatgactgcgtgcagtgccatgccacccggcgagccatggagagccggggactggcctttgaaatggtcaacgtcgaccagcagccggatgccgccgacaccctgcgcgagcagggatttcgccagctgccggtggtgatcgccggtgagctgcgctggagcggcttccgcccggatatgatcaatcgcctgcgcccctcctttacggcggccagcgcatgagcctcatcgtctacttctccagccgttcggagaatacccatcgctttgtgcagcgcctggggctgccggcggtgcgcatcccgctgaacgagcgtgaacatctgcgggtagacgagccctatattctcatcgttcccagctatggcggcggcggcaccgccggcgcggtaccgcgtcaggcgatccgctttttaaacgacgtgcataaccgccagctgatccgcggagtgattgccgccggcaatcgcaactttggcgacggctgggggcgtgccggagatgtcatcgcgcaaaaatgcgccgtgccctatctctaccgcttcgagctgatgggaacccccgacgatatcaacaccgtgcgtaaaggagtcagcgaattttggcaacgacaaccgcagaacgtataaccgccgccgtggattttcacgccctcaacgcgatgctgaatttgtacgacagcgagggccgcatcccgtttgagaaagatcgccaggcggttgaggcctttatggcgacccaggttcagcccaacgccctcaccttccccagccaggaggataagctcagctggctcgtcagcgagggctattacgatccgcaggtgctggccggctatgaccgcgggtttgtgctggcgttgttcgcccatgcccggcgcgctccgtttcgctttcagaccttcctcggcgcctggaagttctataccagctatgcgctgaagacctttgacggcaagcactacctcgaggatttcgccgaacgcagcgtgatggtggccctgacgctggcccggggcgatgaacagcaggcgcggcagctgacggaggagatactcagcggccgctttcagcccgccacaccgaccttccttaacgctggcaaacagcagcgcggggagctgatctcctgcttcctgctgcgtattgaggataatatggagtccatcggccgggcggtgaactcggcgctacagctgtcgaagcgcggcggcggggtggcctttttactctccaacctgcgcgaggccggggcgccgatcaagcgcatcgaaaaccagtcttctggggtggtgccggtgatgaagatgctggaggacgccttctcctacgccaatcagctcggcgcccgccagggggcgggtgcggtctggctgcatgttcaccatcccgatattttacgctttcttgatactcggcgtgaaaatgccgatgagaaaatccgcatcaaaaccttgtcgctgggggtggtgatccctgatatcaccttccagctggcgaaagaagatgcgcagatggccctgttctcgccttatgacgtcgaacggctgtacggcaaacctttcgccgattgcgccatcggcgacctctatccgcagctggtggccgacgagcgggtccgcaagcgctggatccgcgcccgcgacctgttccagcgcctggcggagatccagtttgaatccggctacccgtacatcatgtttgaagacaccgtgaaccgcgccagtccggtggccgggcgggtcaccatgagcaatctgtgttcggagatcctgcaggtcagtacgccgtccgcctataatgaagacctcagctatgcccatatcggggaagatatctcctgcaacctcggctcgctgaacatcgcccacaccatggactcgccggatttcggccgcacaatcgccaccgcggtgcgcgccctgaccgccgtgtccgacatgagccacattcagtcggttccctcggtggcggccggcaacgcggcctcccacgccatcggcctggggcagatgaatctgcacggttacctggcgcgggagggcattgcctacggcagcccggaggggctggacttcaccaatatctacttctacaccgtgacctggcacgcgctgcacacctcgatgcagctggcccgcgagcgcggccagcgcttcgccggcttcgagcagtcgcgctacgccagcggggcgtacttcgacaaatatctgcaggaggagtggcagccgaaaaccgaacgggtgcgcacgctgttcgcccgcgccggcatctctctgcccgaccgggaaagctggcgccagctgcgcgacgatgtcatgcgctatggcatctacaatcgctatctgcaggcggtgccgcccaccggctcgatctcgtacatcaaccatgccacctccagcattcacccgatcgtctcgaagattgagatccgcaaagaggggaaaaccgggcgggtgtactaccccgcgccatttatgaataacgacaatctggccctctaccaggatgcgtatgagatagggccggagaagatcattgacacttacgccgaggcgacgcgccacgtcgaccaggggctgtcgctgaccctgttcttccccgataccgccaccacccgcgatatcaacaaggcgcaaatttacgcctggaagaaaggcatcaagacgctctactacatccgtctgcgccagctggcgctggaaggcactgaaattgaaggctgcgtgtcctgcgcgctgtaaggagaacaggatgacccatttaacgcgcgtcagcgcaatcaactggaaccgcattgatgacgataaagatcttgaggtctggaaccgtctcaccagcaacttctggctgccggagaaagtgccgctgtcgaacgacattcccgcctggcaaaccctcagcgcggcggagcagcagttgaccattcgcgtctttaccggattgaccctgcttgacaccattcagaacaccgtcggcgccccggcgctaatggcggacgccttaaccccgcatgaggaggcggtgctgtcgaacatcagctttatggaggcggttcatgcccgctcttacagctccatcttttccacgctgtgccacagcaaggaagtggatgccgccttcgcctggagcgaaagctgcgatcccctgcagcgcaaggcgcagctgatgctggattactatcaggccgacgagccgctgaagaaaaaaatcgccagcgtgttcctcgaatcctttctcttctactccggcttctggctgccgatgtacttctccagccggggaaagctgaccaacactgcggatctgatccgcctgatcattcgcgatgaagcggtgcatggctattacatcggctacaagtaccagaaaggactggagatcgtcagccccggcaagcgcgaagaattgaaaaatttcgccctcgatctgctgatggatctttacgacaacgaactggcctacagccgggagctgtacggcgagagcggctggttcgacgacgtcagcgctttcctgtgctacaacgccaacaaagcgctgatgaacctcggctacgaggcgctgttcccggcggagatggcggcggtcaatccggcaatcctcgcagcgctgtcgcccaacgccgacgaaaaccatgactttttctccggttccggctcctcctacgtgataggaaaaatggaagagaccgccgacgacgattgggacttttaaccgtactttcaccaggaatatcgcaggcggattcctggtgattaatttcacaaaatagcgtttaatccaccaaatattctctccatgacctaaccgtcatcacttcgtcatatttagcagaaaaccggtccatttcagtagaattatccaaagataatcaaaaaatattaccaacaacaaattaccgcccagcccttatatcacgggggcttagccacagttgcccccatctgattttgccgagagtttgccattgagggttgtcacagaatctgagtatgttagggtgtaaaaagatcataatcaccatcgggtatcatatcgcaataaacaaataacaggaacttctctattgcatggcaattaaattagaaatcaaaaatctttataagatatttggcgagcatccacaccgtgctttcaaatatattgagaaaggactcaacaaagcgcaaatactggaaaaaacggggctgtcgcttggcgtcaaagacgccagtctggccattgaagaaggcgagatattcgtcatcatggggctctccggctcggggaaatccaccatggttcgccttctcaatcgcctgattgaacccacccgcggccaggtgctgattgacggggtcgatatcgccaaaatgtcggatgccgagctgcgcgaggtgcgtcgcaagaaaattgcgatggtttttcagtcctttgcgctgatgccgcacatgagcgtgctcgataacacggcgtttggcatggcgcttgccggcgttcccgccgccgaacgagagcaaaaagcccgggaggcgctgcgtcaggtggggctggagaattatgcccacgcctggccggatgaactctccggcggcatgcgccagcgcgtcggtttagctcgcgccctggcgattaatcccgatattctgttaatggatgaagccttctctgcgctcgatccgctcattcgtaccgaaatgcaggatgagctcatcaaattacaggcgaagcatcaacgcactatcgtctttatttcccatgaccttgatgaagccatgcgaattggcgatcgtatcgccattatgcaaaatggcgaagtggtccaggtcggcactccggatgaaatattaaataatccggccaatgattatgtgcgcaccttcttccgcggcgtggatattagccaggtattcagcgcgaaagatattgcccgccgcagcccggttggcctgattcgtaaaacgcctggttttggcccccgttcggcgctgaaattattacaggatgaagaccgggaatatggctatgtcatagagcgcggtaatcgctttgtcgggattgtctcgattgattctctgaaaacagccctcagcgccgggcaggggatcgaggcggcgctgattgacgccccgctggcggtggaagcgcaaaccccgctcagcgatctgctctcccacgtcggccacgctccgtgcgccgtgccggtagtggatgaagaacaacaatatattggcatcatttccaaacggatgttgctccaggctttagatcgcgagggggtgaatcatggctgatcagaccaatccatggggcagcgccccgtcaaccgacagcgcctcgcaggctgccgacgcctggggtggcgcctctactgccgcgccggctaatggcggcggcgccgactggctgcacagcgccccggcgccgcagccggaacagttcaatatcatggatccgttccataagaccctgatcccgctcgacagctgggtgacccacgccatcgactggatcgtgctgcacttccgtccgctgttccaggggatccgcgtgccgatcgactacatcctcagcgccttccagcagctgctgttggggatgccggcgccggtggcgattatcgtcttcgcgctaatcgcctggcagatctccagcctcggcatgggggtcgccactctggtatcgctgattgccatcggcgccatcggcgcgtggtcgcaagccatggtcactctggcgctggtcctcaccgccctgctgttctgcatggttatcggcttgccgctggggatctggctagcgcgcagcccgcgggcggcgaaaatcatccgcccgctgttggatgccatgcagaccacgccggcgttcgtctatctggtgccgatcgtgatgctgttcggcatcggcaacgtaccgggcgtggtggtgacgattatcttcgccctgccgccgatcgtccgtctgaccatcctcgggataaaccaggtgcctgcggatctgatcgaagcgtcgcgctcatttggcgccagcccgcgccagctgctgtttaaggtgcagctgccgctggccatgcccaccattatggccggggttaaccagaccctgatgctggccctgtcgatggtagtgatcgcctcgatgatcgccgtcggcggcctcggccagatggtgctgcgcggtatcggtcgcctggatatgggcctggcgaccgtcggcggggtggggatcgtgatcctggcgattattcttgaccgcctcacccaggccgtcggtcgcgacgcccgcagtcgcggcaaccgccgctggtacaccaccggcccgctggggcttatcactcgccctttctgtcgataagtcgataacagcgccgctccccgacaccagccgatgcccgggagcggcccttcccgttaaacaataagaggaaccaccatgcgacatagtacgatgttggccaccgccgcctttgccaccctgctcgccaccagcgccttcgccgccgacctgccgggtaaagggattacggtgaagcccgctcagagcactatctccgaagagagcttccagaccctgctggtcagtcgcgcgctggagaagctgggctacaccgtcgagaaacccagcgaagtggactataacgttgcctatacgtcgattgccgccggagataccacctttatcgccaccaactggcaaccgctgcacgatgacatgtacgccgcggctggcggtgataacaaattctatcgcaaaggagtgtacgtctcaggcgccgcccagggctatttgatcgacaaaaaaaccgctgagcagtaccacatcacctccatcgatcagctcaaagatccgcagatcgccaaactgtttgataccaacaatgacggtaaagcggatctcaccggctgtaccccaggatggggctgcgaagcagtgattaaccatcagattgacgcctatggcctgagcaaaaccgtcacccataaccagggcaactacgcggcgatgatggccgacaccattgcccggtataaagagggtaaaccggtgctctactacacctggacgccgtactgggttagcgacgtgctgaagcctggcaaggacgtcgtctggctgcaggtgccgttctcctccctgccgggcgagcagcaaaacatcgacaccaaactggccaacggcgccaactatggcttcccggtgaacaccatgcacatcgtcgctaacaaagcctgggcggagaaaaatccggccgccgccactctgtttagcgtcatgaagctgccgatcgccgacatcaacgccgagaatgcaatgatgcatgaaggccatgcttccgaagccgacattaacggccacgttgatggctggatcaaagcccaccagccgctgttcgacagctgggtgaaaaccgccctcgccgcgcagcagtaaacccgctcacggataaggcccagcgccttatccggcccccttgccccctttctcgtggccaggtcatagaaaagcgattccaggaatttccatagtgttaaggcgcatcgcgctctgttaaggtggagacatcggtcaaattgccaccttcacatggatccagcgataagttattcatatggaaaaccccgcgcccttaacctgtgccttacctgaacgcgtcgccaccgtcggcgaaggcatcaaagacagtctccccatcgtcatcagctaccttccggtggcattcgccttcggactcaatgccacccggctgggcttcaccccgctggaaagcctgttcttctcctgcattatttacgccggcgccagccagtttgtgatcaccgccatgttggccgccggcagttcgctgtgggtcgccgccctgacggtaatggcgatggatgtccgccatgtgctgtatggcccctcattgcgcagccgcattcgctcagcgctggataaaaagaaaaccgccctctgggccttcggcctgaccgatgaggttttcgccgccgctaccgccaggctggttcgcgataaccgccgctggagcgaaaactggatgcttggtctcgcttttacctcgtgggcatcgtgggtgtgcggcacgctggccggcgcctggtccggcaacggcctgctggtggattatccggcggtggaagccgccctcggctttatgctgccggcgctgtttatgagcttcctgctggcctctttccagcgtcagcagtcactctgcgtcacggcggcgctggcgggcgcgctgggcggcattctgttattttccattccggcggcgatcctcgccggaattgtctgcgggtgtctgacggcgctgcttcaggccatgctcaaggggatgccggatgaacagtgaagtccttctgctcggggtgatagtcggcggcgtcaactatctctttcgctatcttcctctgcgtttgcgcgccggccacgcccgtcctgcccgccgcggcccggtcagcgtgctgctggatactattggcatcgcctcgatttgcgcgctgctggtggtctccagcgtgccggagatcctcgccgatgcccatcgcctggcgccgacgctgaccggcttcctggtgctgggggccgccttctggaaaacccgcagcatcattgtcccgaccctgctgtcggcgtttgcctatggtctggcatggaaaatcaccaacgggctctaagctttacgtatcaattttggtcaataattcatttgatttatttgtcacaatagttattatatcggctgtaattaatgaggtcatacccaaatggatagttcgtttactcccattgagcaaatgctcaagttccgcgccagccgccatgaagatttcccgtttcaggagatcctgttaactcgtctttgcatgcatatgcaaggtaagctgctggaaaatcgcaataaaatgctcaaagcgcagggaattaacgagacattatttatggcgctgattacgctggagtcacaggaaaaccacagcatccagccgtccgagctgagctgtgcgctgggctcgtcacgtaccaacgccacccgtatcgctgatgaactggaaaaacgcggctggattgagcgccgcgagagcgataacgatcgtcgctgtttgcatctgcaactgaccgaaaagggccatcagtttttgcgtgaagtcctgccgccgcagcataactgcctgcatcagctgtggtcttcacttagcaccagcgaaaaagatcagctcgaacacatcacccgcaaactcctgagccgccttgatcagatggaagaagaaggcgtgctagcggactctctacgctaagggcggcgtcgctcagcccatttttacgttgcaaggaaaacagccaggccagcagatctctgctggcctttctgataaacaggtcggctcagccgatgtgaaataataagatcgtggagaataacatgagtgcaaatgcggagagccaaaccccgcagcaaccaggcagcaaaaaaggaaagcgtaaaggcgcccttctgttgctgacattgctcttcattattattgccgtggcatatgggatttactggtttctggtactgcgtcactacgaagagaccgacgatgcctacgtagcagggaatcaggtacaaattatggctcaggtcgcgggcagcgtgaccaaagtctgggctgacaacacggactacgtgcagaaaggcgatccgctggtcactctcgatcggaccgatgcccaacaggcgtttgaaaaggctaagacccaactggccgccagcgtccgtcagacccgccagcagatgatcaacagcaagcagctgcaggcaaatatcgacgtcaaaaaaaccgccctcgcccaggcgcaggctgacctgaaccgccgcatcccgctgggcgccgcgaacctcattggccgcgaagagctgcagcacgcccgcgataccgtcgccagcgcacaggccgaactcgacgtggcaatccagcagtacaacgccaaccaggcgatcgtgctgggcaccaggctggaacagcagccggcggtgctccaggcggccactgaagtgcgtaacgcctggctggccctgcagcgtacgcagatcgtcagcccgattagcggctacgtttcccgtcgctcggtacagcctggcgcgcagattggcaccaccacgccgctgatggcggtggtcccggcgaccaacctgtggatcgatgctaactttaaagagactcagctggcgcatatgcgtatcggccagccggccaccgtgatcagcgatatctatggcgatgacgtgaaatacaccggtaaagtggtcggtctggatatgggcaccggcagcgccttctctctgctgccggcgcagaatgccaccggcaactggatcaaagtggtacagcgtctgccggttcgtatcgagctggatgaaaaacaactagcggaacacccgctgcgtatcggtctctcgacgctggtggaagtcaacaccaccgatcgcgatggtgaaatgctggccagccaggtgcggagctccccggtttacgagagcaatgcccgcgaaatcgctctcgatccggttaataagctgatagacgagatcattcaggccaacgccggataattcggggtgagtgtaatgcaacagcaaaaaccgctggaaggcgcgcaactggtcattatgaccattgcgctgtcgctcgcgacgttcatgcaggtgctggattccactatcgccaacgtggcgatcccgaccattgccggcaaccttggctcgtcgctgagccaggggacctgggtcatcacctcgttcggggtcgctaacgccatctccatcccgatcaccggctggctggccaagcgcgtcggcgaggtgaagctgttcctgtggtcaaccaccgccttcgccattgcctcctgggcctgcggcgtctccaacagcctgacgatgctgattttcttccgcgtcattcaggggatcgtcgccgggccgctgatcccgctgtcgcaaagtctgctgctcagcaactatcccccggcgaagcgctctatcgctctggcgctgtggtcaatgacggtgattgtcgcgcccatctgcggtccgatcctcggcggctatatcagcgataattatcactggggctggatcttctttatcaacgtgcccattggcgtggcggtggtgctgatgaccctgcagaccctgcgcaaccgggaaaccaaaaccgaacagcggcggatcgacggcgtcggtctggcgctgctgatcatcggtatcggtagcctgcaggtgatgctggaccggggtaaagagctggactggttctcctccaatgagattatcattctgaccatcgtggcggtggtggcgataagcttcctgatcgtctgggagctaaccgacgataacccgattgtcgatctgtcgctatttaagtcgcgcaacttcaccatcggctgcctctgtatcagtctggcctatatgctctacttcggcgccatcgtactgctgccgcagctgttgcaggaggtctacggctacaccgcgacctgggccggcctggcgtcggcgccggtgggggtgatcccggtcattctgtcgccgattatcggccgcttcgcgcataagctcgacatgcggcggctggtcaccttcagctttattatgtacgcggtctgcttctactggcgcgcctggaccttcgaaccggggatggactttggcgcctcggcgtggccacagtttatccagggcttcgcggtggcctgcttcttcatgccgttgaccaccatcaccctctccggcctgccgccggagcggctggcggcggcgtcgagcctgtcgaacttcacccgtacccttgccggctccatcgggacctcgatcaccaccaccctgtggaccaaccgcgaggcgctgcatcatgcgcagctcaccgaatcggtgaccccctttaaccccaacgcgcagcagatatacgatcagctgcagggcatgggaatgacgcagcagcaggcgtccggctggatagcgcagcagataaccaaccaggggctgattatctccgccaacgaaatcttctggatttctgcggctattttcatcctgctgttggggctggtgtggttcgccagaccaccgttcagcgccggcggaggcggcggcggcgcgcactaagcctcacataaagggacctccgggtcccttttttacggcgtcaggttgtccagttctcgctagtttctgtctcgtttgcgaaagcccgtcaccctgcgctcgggcaggataaaggctgaccattaaggagaacactatgctgagccatcctgctgaaaagtaccgtccctatccgccgatcgccctgcctgaccgccgctggccagaccggcaaatcagtcacgccccgcgctggctgtcgactgacctgcgcgacggcaaccaggcgctggcggagcccatggacagcgcccgcaaactgcagttctgggatctgctgctggagtgcggctttaaagagattgaagtcgccttcccttccgcctcacaaaccgatttcaactttgtccgccagctgattgacgaacagcgcatcccggaggatgtcaccatccaggtgctgacccaggcgcgagacccgctgatcctgcgcacctttgaggcgctgcgcggcgcccgccgggctaccgtccacctctacaatgccaccgcgccgctgttccgcgagctggttttcggcatggacaaggccgaggtgatcgccctcgcgacccgcgccacccggcttatccgtcagcagtgcgaacagcagccggagacccgctggcaatatgaatattcgcctgaaaccttctgcttcaccgagcccgagtttgcgcttgagatttgcgaagcggtggcggatgtctggcagccctgcgccgagcgaccgatgatcgtcaatctgccggcgacggtggaagtcaacacccccaacgtctatgccgatcagatcgagtatttttgccgccacttctcccgccgcggcgaggtctgcatcagcgtgcatccgcataacgatcgcggcaccggcgtcgccagcgccgagctggcggtgatggccggcgccgatcgggtagaaggctgcctgtttggcaacggcgaacgcaccggcaacgtttgtctggtgactttggcgatgaacctctacagccagggcatcgaccctgagcttcgcttcgagcagatgaaccgggtggtggaggtggtggaaaactgcaaccagatccccgttcacccgcgccacccgtgggcgggaagtctggcttacaccgccttctccggctcccatcaggatgcgatcaaaaaagggtttgatgcccgtcagcctggcgatccgtggcagatgccctacctgcccattgacccgcaggatattggctgcagctatgaggcggtgatccgcgtcaacagccagtcggggaagagcggcagcgcctggcttatcgaacaaaatcatggtctgaaactgccccgcgggctgcagcaggacttcagccagcacgttcagcaggccaccgatagcgacggcaaagagatgacccaccatgcgctgtggcagctgttccgcacgcgctacgggctgcaggcgcagccggcgctgacgctgctcgattatcagagcgccagccagcaggatggccagctttccctgcaggcaacgctgcgtcaccacggcgaaacccgacgcctgcagggccagggcaacggcctgctctccgccgcagccagcgggctcagcgcgctgtttcggcagccgtttatgatcaaggactatcatgagcatacgctcggcgcgcgcagcgacagccggtcggtggcctatatccgctgcgtttttccgcaaggagaaagctactggggcgtgggtatcgataatgacgtggcgcgcgcctcgctgcaggcgctgtgcaatgcgctcagcgccgccgatcaggccgggggacgaaaatagtcgctgggggcgacgcccatcacccgacgaaacatggcgctgaaggcgctgtggctaccgtagcccagctccagcgccacccgcagcacggagtggccctgcgccaggcgcaccagcgcttccattagcttcgcccggcgcacccactcgctccacgtcaggctagtctgctgctgaaaatggcggtttagggttcgctcgctcatgctgcacgccttcgccgcctggccgctgctccaggcctcgcccggcgcctcgcgtacctgctggcacagccgacgcagcgtttcgctttgcggctccggcaggccaaacggcaggatcgccatcccgcggatctcatcgaggatcagttcataaattctttcgtcgcggctggcgggggcatagcgttccgccagcgccagggatgacacgatcagttcccgcagcagcggcgtgatctgtacaatctggcagcccgccggaagatcggcgcgcgccagcggatcgataaacagggtgcgcgccgccacgttgccggtcatgcgcagcgcgtgcggcgttcccgccggcagccagacgccgcgcccgggcggcaccacccagtagcctaccggcgtcgcgacccgcaccacgccgcttagtatatgcagcagctgggcgcagtcatgttgatgccagtcttcctggtcaccgtgggcataatcatgggcaaagggcaccagtgggcggtgctgaaaggagaaggaaagcgtcgtcgtcatcgcggcgtcagaagagcggcccggcgacaggcgtcgggccgtggcggaagcactagatgtgcagttcctgcagtttttctttcggcaacgccagttcgtcgttgctgttgatgcgcacatcgcgctcaatgatatgacgagcgatgtcctgggcctcttccagcgagtgcatggtgtaagtcccgcactggtagacgttgagctccgggatctggttctgatctttcaccttcagcacatcggccatcgccgctttccaggcgtcagcgacgcgctgctcgtccggcgtaccaatcaggctcatatagaagccggtgcggcagcccattggcgaaatgtcgataatttccacgccattcccgttcagatgatcgcgcataaagcccgcgaacagatgctccagggtgtggataccgcgttccggcatcacttcctggttcggtacgcagaagcgcagatcgaaaacggtgatttcatcgccatgcggcgtgttcattttcttcgcgacacgcaccgctggggcttccattcgggtatggtcgactgtgaaactatctaacaacggcattcgtcacctccgggagtgaatttttttaaaataaaatgaactctttgttcagccgcgagtctcagtatatgaaagacgcgcatttattatcatcatcatccctgaatcagagatgaaagtttggccacagtgatgtggcctttttcttttccagcgctacgcgtgccgcgccagcagcgcctcaaacggctcgctgtcttcagcttccactttcttctgtcgcgccaccgacgcgtcgcgctcggcgataaaatcgtcttcgctcaggatctccagcggctcttcgcgcagctgcgtccggtaacgatcggcaagcgcacggccggtaccgccaatgccttcttcaatcatagaacgcagaatgcgggctgagaaggttaattccggatcgtcaaagcaggccagcagctcgtcgcagacctgctgatatgcctggccaccgtggatactgtccagggtctgcgccacgcggcgtaaatcgcggaacagatctttgcccacctgagccagcgggaactgcgcgctttcgcagccaatccccagcgttaagcccggcttacgcccttccagaatcacccgattccagttggtgcgggtgcacagcagctcatcgctgctcatctccggcgcgtcggccagcgcgcaccagaccataaacaggtcgaggaaacgcacctgctgggcgtcaacgccgatcggcgagaacggattgatatccagcgaacgcacttcgatatactcaataccaccgcgcaacagcgcatcggacggggtttcgccccgacgggtgacgcgtttcgggcggatcggcgcataaagttcattttcaatctgcagaatgttgctgttgatctgcaggtacttgccgtctttctgcagcccgattttggcgtactcttccgacggcgttttaatcgcccgcttcaatcctgccacatactcgtgcagatcgttaaacgtaattccgagattgctttgcgacttattggtataaccaaggtcgctgaggcgcagcgaggtggcatacggcaggtaatacatgccgttgcccgtttcctcaaagggcagcgttgtcggtttgccttgcaggaatgaggagcaaatcgccggcgaggcgccaaacagataggggatcacccagccaaagcgatagtagttacgaattgagcggaaatagcccgccgaaatggcctctttaccactctcggcatcttccacaccacattttgcctgccagaaggccatcggtagggagaagttatagtgcacgccggagatagtctgcatcagcgcgccatagcggttcttcagcccctcgcgatatagcgttttcaggcgccccacgttagaggtgccgtactgcgccagctcaatatcctgaccgggggcgatatagcatggcatgctcagcggccacatccgctcgtcgccaagctgacgcgcggtatagcgatggacatcgcgcataaaggtcagcatatgctcaatatcgccatctactggcgtaatgaactcaagtaaagcttcggcaaaatcggtggtaatccatttatgcgtcagcgctgagcctaacgccggagggtgaccggtcgttgcaagggtgccgtctgcgttcacgcgcagcgtttcccgctccagaccacgttgaataccctgcagagcctgcggatgtttttccagccaggccagcgcctgtgatacgtccgggatcaatttgacctcccgcctgtcgaaatcgtttgaataagcataattgtaatggatgaactgtcagtccaattagtgccaccacgtcatgccctgaagcgtcgctgccgcaatagcgatatagcgcagcgccttaccaaggcataagaaaaagagtaccggtccccaggaaatgcgcatccatcccgccagcaaacacagtaaatcgccgacaaccggcgcccagctcagtaagagcgtgaccgcgccgtagcgcttaagccagccggccgcccgctcctgccagcgcgaggttttgcgcagcggaaacaagcgccccagaataacgttagttacccctccaaggctattgccgattgttgctattaatactaaccaccacggatgactgacccccgcaagtagcatagccaccagcacaacctccgaattgccggggagcagcgtggcgcttaaaaagctactggcaaacagcgaggtgagtgacagcgcgtcgctcacagcaaacgcacgtcaactgcgtccattcccgcgcgcttcgccgcctgcagaccaaagtcggcatcttcgaagacgacgcatttttccggcgcgacgcccatgcgctcggcgcacagcaggaaggtatcgggcgcgggtttatggttgaccacatgatcggccgccaccaccgcggagaagtaatgacgcagccccaggtgcgccagcagcgcttcggcgacggcgctctcgctgccggttcccaccgacatcgggcgacggccgtgccatgccttaaccacctcaatcagcggcaacgggcgtacgctgtccagcagcatcgctttgacggcctgggttttttcctgcgccaggcgatgtggatcgagatcggcctggttgagttcgataatcgcctgggcgattcgccaggttggtgagccattgagcgcgaccatcgcctgttcgtcgaaacgcataccgtagcggcccaatacctcgttccatgcctgccgatgggtcggctcggtatcgagaatggtgccatccatatcaaagatcagtcctgcgtaaccttcgtacattgtcttctcaccaaccggtttgggaatgattactgtaacgcaaaagcccgccgttgtcgcggccagcggcgcagacgacaaaggcgccctcaggcgcccccaaacattaggccggataaccagccttatttaatacgcagatcgttctcgaccattcgcacgccctgcactcggcgtgtgacttctatggctcgtttagcgctctccgcggaggagacaaatccgctcagctggacgcggcctttaaaggtctggacgctaatttctgaggacttaatgtctttatcgttaaagagcgccgttttcaccttggtggtcaccacggtatcgtcaatatagccgcccgtactctcctttgtagccgatcccgcacagccagcgagggccgtcgttaccagcagcgtcgcgcaaaaagcaggtattgctttgaaccatttcatggatttctctccttgcatttatctcagcctgataacgctgatatacaaggataaattatagtggaaagcgcgtcttgccaataaaaaagtaggatgaagccagtgatggaaaacgaggtaatcgggatggtgagagaagagtgaagattatgcattcagaacgggtgctgcgataatttcgcagcctacgcaacaacatcgtcgttgttactgaggagaatatggtgcatccgggaggatgactcggctacgcctcgcccttcgggccgttgcttacgcaacattatcccccctggtgctggcgatgatttcgcagaccataaaacaacatcgtcgctgttactaaggagaatatggtgcatccgggaggattcgaacctccgaccgctcggttcgtagccgagtactctatccagctgagctacggatgcatcgggaaagctattttactgcggggttactctcctggcacttacgatggtttcgcaaaccagataacaacaatgttgctgttactaaggagaatatggtgcatccgggaggattactcggctgcgcctcgccctacgggccgttgctcacgcaacgttatcctccctggtgctggcgataatttcgcagaccataaaacaacatcgtcgctgttatcaaggagaatatggtgcatccgggaggattcgaacctccgaccgctcggttcgtagccgagtactctatccagctgagctacggatgcatcgggattactgctgtaattctgatatcaaatttcgcgatttgccattcttattaaagaatggtgcatccgggaggattcgaacctccgaccgctcggttcgtagccgagtactctatccagctgagctacggatgcatcgggaaacttgctttactacgcgtcagtgtcacaactaacacatgccacactgagtatgatggcctaatcggtagagtgactcgattatgcctcgcactgcgggccgctgctttcacagcgctcttctcgcttaattcagaaagaagatggtgcatccgggaggattcgaacctccgaccgctcggttcgtagccgagtactctatccagctgagctacggatgcaaaatggcggtgaggcggggattcgaaccccggatgcagcttttgaccgcatactcccttagcaggggagcgccttcagcctctcggccacctcaccacacacgcctctttcgagtgcttcgaagaacttgtttctgctcttcgtcgctgcgatggcgcacatattactttctggtacttataagtcaaacactttttcgagaccttttttcgtttgcacacttcgcacgcaattcgcgtgcaaaaacggcaaaaagggcaatttatcaacaggaaatcagccctgacgctggcataacgccaaacgaccaaagcggcaaagggtaatgaaaagcggtatggcgcagggggaaaaaaagaaaaagggaaaaagcgacggtaagtgatgcgcctcactgcacagcgaggcgcggaaaccttagtaactggactgctgggatttttcagcctgaatacgctggtagatctcttcacggtgaacagacacttctttaggggcgtttacgccaatacgaacctggttacccttcacccctaaaactgtcacagtgacctcatctccaatcatgagggtctcaccaactcgacgagtcagaatcagcattctttgctccttgaaagattaaaagagtcgggtctctcgtatcccggcattatccatcatataacgccaaaaagtaagcgatgacaaataccttagggtataagcagtcatggcatcacattctgttaaacctaagtttagccgatatacacaatttcaacccgactttatcgttatcagtgtttctgacgcaaggtgccgtaaccctctggttatggcacctatacccctcatacttcaagttgcatgcgtgttggctttcctcgctcaccccagtcacttacttgagtaagctcctggggattcgctgcgtcgccgccttcctgcaactcgaattatttagggtaaatgcgtttatagttattacagttttgcgctgacccagcctttcacactggctaacgctgcagggagagcagacgcatcggtaccaccggcctgcgccatatccggacgaccgccccctttaccgcccacctgctgagcgaccataccaaccagctcccctgctttcacgcggtctgtcacatccttagacacacctgcaatcagagaaaccttaccatccgctaccgtagctaatacaacgatcgtcgaaccgagctggttcttcagatcgtcaaccatggtacgcagcattttcggctcaacgccggtcagttcgctgaccagcagcttaacgccgttaatctcttccgctttgctggagaggtttgcgctctcctgcgccgcagcctgctctttcagctgctgcagctctttttccagctgacgggtacgctccagcgcggcgcgaaccttctcgccgagattgtggctgtcacccttcagcagctgagcgatatcattgagctgatcgctctgcgcatgcaggatggccatcgcgccttcgccagtcaccgcttcgatacggcgcacgccagcagcggtgccggactctgacgtgatgcggaacaggccgatatcgccggtacgcgccgcgtgagtcccgccgcacagctccgtggagaagtcgcccatccgcagaacgcgcacgcgatcgtcgtatttctcgccaaacagcgccatggcgccggatgcgcgcgcggcatcgatatccataatgttggtttcgatagccaggttacgacggatctgcgcgttgaccaggtcttccaccgcacgaatttcttccggcttcatcgcttcaaaatgcgagaagtcaaagcgcagcgctttatcattgaccagcgaacctttctgcgccacatgggtgccgagcacctggcgcagcgccgcgtgcatcaggtgcgtcgcggagtggttgagacggatacgatgacggcgagcctcatctacgtcggcctgcaccgcgtcacccactttcagtgagccgctggcgactttaccgatatgaccaatagcctggccgtacttctgcgtgtcgctgactgcgaaggagaagcccgcgccttttaattcgcctttatcgcccacctggccgccggactccgcatagaacggggtctggtcaaggatcaccaccgcttcctggccagcgctaacgctatccaccgctttgccgtcgataaacagggcggtaaccttgccgttcagctccagatgatcgtagcctttaaattcagaggcgccgtcaacgcggatcatcgcattatagtcggcgccgaaaccgctggactcgcgcgcgcggcggcgctgctcttccatcgcggcttcaaaaccagcttcatcaaccttgatgttgcgttcgcggcacacatcggcggtcaggtcgaccgggaagccgtaggtgtcgtacagacggaaggcggtttcgccgtccagggtgtcgcctttcagcttcgacagctcctcatccagcagcgccaggccgcgctcgagggtgcgggcaaactgctcttcttcggttttcagcacctgctcaacctgagcctgctgctgcttcagctcgtcgccggcggagcccatcacatcgatcagcggggcaaccagtttccagaagaaggtgtccttcgcgcccagcatgttgccgtgacggatcgcgcggcgaatgatacgacgcagcacgtagccgcggttttcattcgacgggatcacgccgtcggcaaccaggaaggcgcaggagcgaatgtggtcggcgataacgcgcagcgacttgttcgtcagatcggtcgcgccggtgactttcgccacgctggcgatcagatcgcggaacaggtcgatgtcatagttggagttaacgtgctgcagcaccgcggcaatacgctccagacccataccggtgtcgacggacggcttcggcagcggctccatggtaccgtcagcctgacggttgaactgcatgaagacgatgttccaaatctcaatgtaacggtcgccatcttcttccgggcttcccggagggccgccccagatgtgatcgccgtggtcaaagaagatttcggtgcacgggccgcacggaccggtgtcgcccatctgccagaagttgtcagaagcaaacggcgcgcctttgttgtcgccgatgcggataatacgctcgcgcggaacgcctacttcattggcccagatgtcgaaagcttcgtcatcggtctcgtaaacggtaacccacagtttttctttcggcagcgcgaaccagttctcaccggtcagcagttcccacgcgtatttgatggcatcctgcttgaagtaatcgccaaagctgaagttgcccagcatttcaaaaaaggtgtggtgacgcgcggtgtaaccgacgttttccagatcgttgtgtttaccccccgcacgcacgcaacgctgtgcggtggtcgcacgcgaataattacgtttgtcgagaccaaggaagacatccttgaactggttcatccctgcattggtaaacagcagggtcggatcgttgtgcggcaccagggagctgctggcaactacctgatgtcccttgctatggaaaaagtcgagaaacgcctgacggatctcagcggtgctcttgctcataattatcctgaaatcaagctacacgtcatccttcaagtcgcctctgtcctggctgcgcttgctcttccggcaccgaactgacgtgcgttgcgaaagagagtctctcttgccgccctgatgcagcttgaatgattttgtgtaaaggaataatcgcccaggccgctgcctgcacagtcacaaccagcggcccgacggaataaagtgggaataagataagttttctttacggcgaagtaaaatcccggatgggtcaatctgcaaaatttcgccagatttcctggatatcttccatcaggtagccgcggtaaagcaggaatcgctgaactttcactttttcagtaaaggcggaaggtaacggttcgccgtatttacgctgtgcctgctccctggcaaggctcacccagtcgatatcgcattcgcgcatcgcctggtcaacgacctggcgcgcaatgcctttctggctgagctcctggcgaatgcgcgccggaccatagcctttgcggctccggctggcgatgaactggccgacgaagcggttgtcgtcaaggtagcggttttcgatacaccaggcgacaacctgctccagctcgtcgggggtgacgtccagcgcctcaggaccgtttttgctcatcaccggagcgaccagcttgcgtcgcagctcctgctcgctgtggtcgcgcatcgccagaatgcggatagcacggtccagcaggcgggcgtagccggagcggcgtgatgaaggttcagtcacaggcacctcgataatctcacaaagcaaaagggctgcctaagcagccctgtcagtcttgcagacgatatcagaagtcctgttcggtttcttctgcgtcgttgccgtcaacaacgaagtctggcttcgcatcctgattgttgagcagcagttcgcgcactttcttctcaatctctttcgccgccgccgggttctctttcagccaggtgatcgcgttcgctttaccctgaccgattttgtcgccgttgtagctataccaggcacccgctttctcaatcagcttctcttttacgccgaggtctaccagctcgccgtagaagttgatgccttcgccgtagaggatctggaattcggcctgtttaaacggcgcggcaatcttgtttttcaccactttgacgcgggtttcgctgccgacgacgttgtcgccctctttcaccgcgccgatgcggcgaatgtccagacgcacagaggcgtagaacttcagcgcgttaccaccggtagtggtttccgggttaccgaacatcacgccaattttcatacggatctggttgataaagatcagcagcgtgttggactgcttcaggttacccgccagcttacgcatcgcctggctcatcatacgcgccgcaaggcccatgtgagagtcgccgatttcgccttcgatttccgctttcggcgtcaacgccgcgacggagtcgacgacgataacatcaaccgcaccagagcgcgccagcgcgtcacagatctccagcgcctgctcgccggtgtccggctgagaacacagcaggttgtcgatatcgacgcccagtttgcgtgcatagacaggatccagcgcatgttcagcatcgatgaacgcacaggttttaccttcacgctgcgctgcggcgataacctgcagcgtcagggtggttttaccggaggattccggaccgtagatctcgacgatacggcccattggcagaccgccggcgcccagcgcgatatccagagaaagcgagccggtggagatggtttccacatccatggtgcggtcttcacccaggcgcatgatggagcctttaccgaattgcttttcgatctggcccagtgcagccgccaacgctttctgtttgttttcgtcgatcgccattgttactcctaatcatgcagggtaaagcgtgttcgcttcgccgttaatatttgttcagttgaggcaattatactgtatggtcatacagtatcaagtgttttgtagaaattgttgccagagcagatttagcgcataggccgtcgcctgacgacgcaccgcttcgcggtctccggcaaagcattcccgccgcgtcaccccttgcccgctcacgctggcgacgccgaaccataccgtgccgaccggcttttcgacgctgccgccatccggcccggcgacgccgctaacggagatggcataatccgcacgcgccgcgcgcagcgcgccaatcgccatctccaccaccaccggttcgcttaccgcgccgttgtcgcgcagcgtcgcttcgctgacgccgatcatttgcgatttagcttcgttgctgtaggtgacaaagccgcgttcaaaccacgccgagctgccggcaatatcggtgatcgctttcgcaatccagccgccggtacaggattccgccgtggtcaccgtcgccccacgcgccttcagcgcccggccaatcttctcgcttagctgcattaattctgaatcggtcattatcgccccgctttgctctggataaagaggccatcaaagatagcactttcgacagagatatggggatgaagcggcgattttacgaggggggatccagaaatgggtcgtcctgtgataaccaggacgaccagacaacctgttacttcatgctgttagcgataagctcaacgttgtgacgcatcattttgacgtaactatcggcgacgccgcccggcttagatagcgcttccggatagagttcgccccccggctgcgcgccggtggcgctggcaatctgcttcaccagccgcgggtcaagctggttctccataaaccaggtatggacgccatccgctttgatttgcttaatcagcgccgccacctgcgccgcgctagcctcgctctctgaagagagcccctgtggcgcgaggaaggtcacgtgataagcccggccaaaatagccgaaagcgtcatggctggtcaggaccttgcgcttggccagcggaatggcgctgaactgcgctttcgcccagccgtcgagagacgtcagctggtcgatatagcgcttgccgctgctggtcaacgccgctttatcttccgggtcggctttcaccagaccatcgaggatattctgcgcatacaatgcgccgttcgctgcgctgttccaggcgtggggatcggtcaccgttttaccctcttcatcaagggtatgggtcttgacgcctttcgatgccaccaccagctcgcccttaaaaccagaggccttaatcaggcgatccagccacccttccagccccaggccgttaaccaccaccacgtcggccttgctgagcagcgcgctatccttcggagacggttcgaaggtgtgcggatcgccgtccgggccgaccagggtatccacatggacatgctccccgccgacctgctgcgctatatcacccaacaccgaaaaactgcttaccacattcagcgttttcgccatggccccctgcgccatcaggccgagggccagcgcgaccactattgcactacgtttcatcatttccttaccccatcaatgtgcgccaaccgaccagcagccggctgcgcgtgccaaaaaatagcgaaacaaaaaacagtgcgctggcggtcagcacaatagcgggcccggcgggaagactaatcgcccaggagaggcttaatcccagccaggcgcagagcgcgcccattcccgccgccagtagcagaatgcccggcagcgtgcgcgcccagcagcgcgcggcgaccgccgggagcatcattacccctaccgccatcagcgtgccgagcacctgaaacccggccaccagattaagcaccagcagcgccagaaaaagcccatgcagcagcgcaggcagccgccggtgattcacctgcagccaggcgctgtcgaacgcctcgctgaccagaccgcggtagcacagcgcaatgcacaatagcgtcaggctggcgacgccgctgacaaacagcgccgcatcgcggtcgaccgccagaatggagccaaacagcagatgcaggaggtccacgctggagccgcgcagcgacaccagggtgacgcccagggccagcgagcccagataaaatccggcaaaactggcgtcctcttttaacggtgtccgccggctcacccacccggccaccagggcaaccacgatgccggcgatgaagccgccgagggtcatggccagcagcgacatgccgctcagcagataccccaccgccacgccggggagaatggcgtgcgacagcgcatcgcccatcaggctcatgcgccgcagcagcaggaagacgcccagcatggtggtgctcagcgacagcgccagacacaccacgagggcccgacgcataaagccgaattcaatgaaaggctgaaagaaggtgtgccagatcatgccgacctcacatgactgaaggccgggagcaccgcccgggtagcgccccagcaggcgcgctggggagtcagcagcagcgtctcggggaaaaagtcggccacccgctggttatcatgcagcaccgccaggatggtctgtccctgccggtgcatctcgaggatcaaatccattagttcgcgactggtcgcttcgtcgataccggtgaagggctcgtcgagcatcaccagcggcgcctgctgcaccatcacccgggcaaatagcatgcgctgaaactggccgccggagagcgcttcgatcggcgttttcgccaggcccgccagcccgacccgctccagcaccgcgccgatgcgtcgccgggtgccgccccccagaccacgcagcagcgacacgccgggccatgcgccctggcttaccacatcctgcacgttgagaggaaactgcgactcgagggcatggcgctgcgccagccagccgatcaccggccgttttccctgccagcgcaggcggccactgaccggcggaagaaacccggcgagggttttcagcagcgttgattttccgcagccattgaggccaacaattgccgtcaggctgccggggcatatcatcccgctcagcggaggggtgatcgctaccccgtcatagccggcgaccagctgctccagttcaatcatggcagcgtcaccgcccaccaggttgctaaccatagcgccgccagcagcacgcctgcgatagccgcgcgcgccgcgccggatgccataaaaatcgatgtgaacatatccccgcctcaatttaatgttataacataacaataacgaagcaaagaaagaatgtaaatcagcgtcagtcagcggaaatgtaacaaaggtcaacaagaggcatggagacggaaaaaacggggggataagcgcggcctccccggcgtcatcccccggtcgcgctgcgcttcccggggctagcaaccggataccagaccgtaacccggataaggcgctacgcgccgttatccggggaggctggggaaattgtcagccggatgaaaggattaataaccgccgcgggcctgcgcaaccgccagacccagctgccagacggccatcgcgtagtgggtgctgtggttgtagcgggtgatggtgtagaagttcggcagcccgtaccagtactcatagccggtgccgacgtccagccgcagcaggctggcctgctgatggttacccagcggctgggtcggggtcagccctgcggccgccagctgcgaaacgctgtatttagtcttgaaaccattctccagccccggggcctgccccagcgcctgcaccgccaccagatcgccgctcacccagccatgctgtttgaagtagttggccacgctgccgatagcatccaccgggtcccacaggttgatatgtccgtcaccgttaaaatcgaccgcatactgcttataggaggacggcataaactgaccgtagcccatcgccccggcgaaagagcctttcagatccagcgggtcgtcgctttcgctgcgcgccattagcaggaaagtttccagctccgacgagaagtattcggcgcggcgcgggtagctaaacgacagcgtcgccagcgcgtcgaggatccgggttttgcccatcacccggccccagcgagtctccacgccgataatgccgacgatgatttccggcggcacgccgtaaacctgataagcgcggttgagcgcgtcctgatactgattccagaacaccacgccgttctgcacattatccggggtaatgaactgtttcttgtagcgcagccaggcgccggtcggcccggttggcggcaggccggtcggcgcctgacgatccatcagccgcaggacgtaatccaggcgctttgcctgcgacaggatctcctgcagctgctgcctgtcgaagccgtgcttcgccaccatcttatcgataaactgcgccgccgccgggttgttggcgaagtcgccgcccatctgcatcacgttatgctgcggttccagcaaaaagccgccggttccactcgccatctccgtttccgcgggggtcttgggtttgctgctgcaggcagcgaggagcacacaaaggggaagtaaagccagatagcgacgcttcaacatgggaattccgtttaacaaattcagcaagggataattatggtaaagcatgcgacgaccaacaagaaagcgacaatctgtttgtagacaaaatagtccttcaacggctcctcccctgcgtgctttcatgccctgcaatatttcatctcgcccgcatcatctttcaaaataaaatatttatctttcattttgcgatccatttaacacttttaaacctttcaaaatgattaaaatcagcctgcgattagcaagaaaaataacatgctgaaggagagaacaatgattgacgtcgtgacccacggcgcggagtggtttatcggcctgtttcagaaaggcggcgaggtatttaccggcatggtgaccgggatcctccccttgctgatcagcctgctggtgatcatgaacgcgctgatcaactttatcggccagcagcggatcgagaagctggcgcagcgctgcgccggaaacccaatctcccgttacctgctgctaccctgcatcggcaccttcgtgttttgtaacccaatgacgttaagcctcggtcggtttatgccagagaagtacaagcccagctattacgcggcggcgtcgtatagctgccactcaatgaacgggctgtttccacatatcaaccccggcgagctgttcgtctatctcggcatcgccaacggcctcactaccctcggcctgccgctcggtccgctggcggtgagctacctgctggtcgggctggtgactaacttcttccgcggctgggtcaccgacctgaccacctcgattttcgagagaaaaatggcgattcagctttcccagaaagtgcatctgtcaggagcgacatcatgacccgtattcgtatagagaaaggcaccggcggctggggcggcccgcttgagctcgacgccgtcaaaggcaaaaagatcgtctatatcaccgccggcacccgcccggcgatcgttgaccgcatcgccagcctgaccggctggcagccggtggacgggtttaaagagggggaaccagcggaaagcgacatcggcgtggcgattatcgactgcgggggcaccctgcgctgcgggctctatcctaagcgccgcatcccgacggtgaatatccatgccaccggcaaatcagggccgctggcccagtacatcacggaagatatttatgtctccggcgtcaaagaggacaacatccagtgcatcgctcccgacagcgcaggggtttccgagccgccggcggaaaacaagagcgcgggtcgcgattacgacaccagcaagaagattactgaacagagcgatggcctgctggcgaaggtcgggatgggcatgggttcggtggtggcggtgctgttccaggccgggcgcgacaccattgatacggtgctgaaaaccattctgccgtttatggctttcgtctcggcgctgatcggcatcatcatggcctccggcatcggcgactggatcgcccacggcctggcgccgctcgccagccatccgctggggctggtaaccctggcgctgatttgctctttcccgctgctgtcgccgtttctcggccccggcgcggttattgcccaggtgatcggcgtgctgatcggcgttcaaatcggcctcggcaacattccgccgcacctcgccctgcccgccctattcgccattaacgcccaggccgcctgcgattttattccggtaggcctgtcgctagccgaagcccgtcaggataccgtgcgcgtcggcgtgccgtcggtgctggtcagccgctttctgaccggcgcaccaacggtgctgatcgcgtggttcgtttccggatttatttaccagtaagaggttcctgcagatgactgtgatttaccagaccaccattacgcacatcggcgcctgcgcgacgatggcgctggaagagcaaatgctgatcaccttccgcgagggcgccccggcggatatcgaagagtactgctttattcacaaccacggcgagcttgctggcacgctgcagccgggggcagagctgcagcttggcgaacagcgctacccggtgaccgccgtcggcgaggtcgctgaacaaaacctgcgcgagctgggccacatcaccctgcgctttgacggccatcgtgaagcggagttcccaggtaccgtccatgtggcgggcccggtgccggacgccatcgcgcccggctgcgtactgaagtttgttgcttaaaaggagagagagatgaatcaggttgctgttgtcattggcggtggacaaaccttaggagagtttctgtgccgcgggctggccgccgaaggctaccgcgtggcggtggtcgatattcagagcgaaaaagccagccgcgtcgcccaggagattaacgctgagtatggcgaaggtatggcgtacggcttcggcgccgacgccaccagcgaggccagcgtcaccgccctggcccacggggtggatgagattttttcgcgcgtcgacctgctggtgtacagcgccgggatcgccaaggcggcgtttattagcgacttcgcgctgggggatttcgaccgctcgctgcaggtcaatctggtgggctattttctctgcgcccgcgagttctcgcggctgatgatccgcgacggtattaaggggcggatcattcagatcaactcgaaatccggcaaagtcggcagtaagcacaactccggctacagcgcggcgaagttcggcggcgtcgggctgacccagtcgctggcgctggatctggcggaatatggcattaccgtgcattcgctgatgctcggcaatctgctgaagtcgccgatgttccagtcgctgctgccgcagtatgccaccaagctcggtatcgatgagagcgaagtcgagcagtactacatcgacaaggtgccgctgaagcgcggctgcgaatatcaggatgtgctgaacgtattgatgttttacgctagcccacaggcgtcgtactgcaccgggcagtcgatcaacgtcaccggcggccaggtgatgttttaacaggttcccggatggcgctgcgcttatccgggctacaaaactgtaggtcgggtaaggcgttagccgccacccgacaaaaaacggcaccgcgggtcgctcgggttaggcgctcgcgccgtgacctgggctgttcccgccccccttaaggagagacctatggttactgcattaatcatcgtcgccgccatcgcctggcttacccagctggcctttggcggctggcagatccgccgcttcaatcgcgcctttgatagcctgtgccagcaggggcgggtgggcgtcggccgctccgccgggcgctttcaaccgcgcgccatcgtcgccatcgccgtcgatgataacgaccgcattagcgacacgctgctgatgaaaggcttcaccattttcgccagtccgcaaaagatcccggctctggcaggcaaacatattgcggaattgcagcctgatgtgatctttccccatgatccgcgctgtcagaatgcactatcattagcgcttaatccgaaacatggataatttcgttgtaaaagtaaatatcttgcgaaattatcacttcgaaacttaaacgcaggatagacgcctatgaaaccacgtcagcgccaggcagccattctcgagttcctgcagtcgcagggaaaatgctcggtcgaagagctggcgcaacacttcgataccactggcaccaccatccgcaaggatctggtcacgctggaaaacgccggcaccgtcattcgcacctacggtggcgtggtactcaacaaggatgaagccgatccgccgattgaccataaaacgctgatcaacacccataaaaaagcgcagattgccgaggccgccgtgcgatacatccacgatggcgattcaattatcctcgacgccggcagcaccgtgctgcagatggtgccattgctgagtcacttcaataacatcacggtgatgaccaacagcctgcatatcgtcaacgcgctatcagagttcgataacgagcagaccatcctgatgccgggcggcaccttccgtaaaaaatcggcctcttttcacggccagctggcggaaaacgccttcgaacagttcagcttcgacaagctgtttatgggcaccgacggtatcgatctgaacgccggagtcactacctttaatgaggtctataccgtcagcaaagcgatgtgcaacgccgcccgcgaagtgatcctgatggccgactcatccaagtttggtcgtaaaagccccaatattgtctgcggccttgaacgcgtggataaattgattaccgatgccgatattgacccggaattccagcgggcgctggaagccaaaggcatagcagtcattattactggagaacatcatgagtaactttttgttagaggccggacgccagaccctgatgcttgagctgcaggaggcgagccgcctgccggagcgcctgggcgacgacttcatccgcgcggcggaaaccattatccactgcgagggcaaactgattgtctccggtatcggtaaatccggccacatcggtaaaaagctggcggcaaccttcgccagcaccggcaccccggcctttttcgtccatccggcggaagccctgcacggcgatctcggcatgctcgatagccgcgacgtgatgctgtttatctcctactccggtagcgcgaaagagctggatctcatcgtgccgcggctggaagaaaaaggcattccgctgctggcgatgaccggcaaatccacctcgccgctggcgctggcggcgaaagcggtgctggatatcgccgtggagcgcgaggcctgcccgatgcatctggcgccaacctccagcaccgtcaacacgctgatgctgggcgacgcgttggcgatggcggtgatgcaggcgcgcggtttcaatgaagaggatttcgcccgttcccacccggcgggcgccctcggcgcgcggctgctgaacaaagtgcatcacctgatgcgtcgtgatgaagaagtgccgcgggtcaataccgaggccaatgtcatggacgctatgctcgaactaagccgaaccggactcggcctggtggcggtctgcgatgaagccaaccgcgtgcagggcgttttcaccgacggcgacctgcgccgctggctggttgctggcggtacgctcaacgatggcgtcactcgggcgatgacccgcaacggcgtaacgctgcaggcggatagccgcgcggtggaagccaaagagcggctgatgaaacacaaaatcagcgccgcgccggtagtggatgagaacggccaactggtcggcgccattaacctgcagaacttttaccaggcggggatcctttaagccccagacgtttcgccagccgatgcaggttggcgacgtccagttccagcgctcgggcggtcgccgcccagttgccctggttcgcctccagcgcacggctaatggcttctcgctgaaaagagtcggtcgcctcgcgcagattgatgtttcccgtcgcgggcgccgctgccgccgtctcagtcggcaacatcggcgccgccaccgcaaactggaaatgctgcggctccaggaccacttcatcaccggcctgggtggcccgcgccagcaccaccgcccgatggatagcatgctccagttcgcgcacgttgcctggccaggaccactgctgcagccggtttcgcgccgcctcagccaaaatgacccgcgccagccccatccgcaggcggcactgctcgcagaaatagcccgccagcagcaccacgtcactttcccgctcgcgtagcggcggaaccgacagcgggaagacgctcagccgatggtacagatcggcgcgaaagcgcccttccaccacctcctggcgcagatcgcggttcgtcgccgccagcacccgcacatcgacccgcaggctgcggtcatcgccgacgcgctgaatatcgccatactgcagcacgcgcagcagtttggcctgcagcgccagcgacagttcgccgatttcgtcaagaaacagggtgccgttatccgccatctcaaatttaccgctgcggttgctgatagccccggtaaatgcccctttcacatggccgaacagctcgctctccgctacgctttccggcagcgccgcgcagttgaggtacaccagcgggttggcggctcgcggcgatccctggtgcactgccttcgccaccagctctttgccggtgccggtttcgccgctgatcagcacgtttaaatccgaggcggcgacgatatcgatctcttttttcagctgcagcatgggccccgacaggccgatgatctcctggcgctccggcagcgggtaattcaccgcctgcgccggcaggacgttttgcgcttcaaggcgggcgataagcagcgcattattcagcgccccggccaccagcgcggcaatcagccgcagctcttcatcgctgaagctatcgaaacgatcggcatccatgccgtccagggtcagcgcgccaatcagcgtctgcccggcaaacagcggcagtcccacgcaggcatggactttgaggctctcatgaccggggatcagcccgtcataggggtcgggcaggtcgctatccgccgggaagcgcaccacatccccggcgcgcgcaatcgcctccagccgcgggtgtccttccagggcaaagcgccgaccgagcacatcctgcgccaggccatcgatcgccagcggcacaaactgatgcgcctcatagcgcagcagcgccgaggcatcgcagccaagaatttgccgcagggtagtaatcaggcgcgaaaagcggtcggtgtgaccaatatcgctttgtaaatctatggcgattctcgccagctcgtcgacggaaaaactcattgccgctccattgtcattttgacaatactcattgtcatatcgactattttaaccattgtcattttgacaacaaccaaaatcagaaaaaattaaaaacagataattatcaattaattaaaaagttggcacgcaacttgatataagccagtcaactgagtttaaacacactgtattgattgaggttgctatgtctattgtggtgaaaaataacattctttgggttggccaacgtgactgggaagtgcgtgatttccacggcaccgaatataaaacgctgcgcggcagcagctacaacagctatctcatccgcgaagagaaaaacgtgctgatcgataccgtcgatcataaattcagccgcgagttcgtacagaacctgcgccgcgaaatcgacctcgccgacctcgactatatcgtcattaaccacgccgaagaggaccatgccggcgcgctgaccgaactgatgatgcagatcccggatacgccgatctactgcaccgccaacgccatcgactcgatcaacggccaccatcatcatccggagtggaacttccacgtggtgaaaaccggcgatactctcgacatcggtaacggtaaacagctgatcttcgtggaaacgccgatgctgcactggccggacagcatgatgacctacctgaccggcgacgcggtgctgttcagcaacgacgccttcggccagcactattgcgacgaacatctgttcaacgatgaagtggaccagactgaactgtacgaacagtgccagcgctactacgccaacatcctgacgcccttcagccgcctggtgacgccgaaaattactgaaatcctcggcttcaacctgccggtggagatgattgccacctcccacggcgtggtctggcgcgataacccgacgcaaatcgtcgagaaatacctcgagtgggcggcagattatcaggaagatcgcatcaccatcttctacgacaccatgtccaataatacccgcatgatggcggacgccattgcccaggggatcaccgaggttgacccacaggtagcggtgaaaatctttaacgtcgcccgcagcgacaaaaacgacatcctcaccaatgttttccgctcgaaaggcgtacttgtcggcacgtccaccatgaacaacgtgatgatgccgaaaatcgccgggctggtggaagagatgaccgggctgcgttttcgcaataaacgcgccagcgcctttggctcgcacggctggagcggcggcgcggtagaccgcctgtccacccgcctgcaggatgccggctttgagatgtcgctgagcctgaaagccaaatggcgcccggatatcgacgcgctggagctgtgccgccaacacggtcgcgacatcgcccgccagtgggccctctcgccgctgccggttgctgaagcagcgacaacgccggaaccacaggactgcgcctgtgccgccgccgcggccgccgatctcggtcccatgatgcagtgcagcgtgtgccagtgggtctatgacccggcgaaaggcgaacctaaccaggatgtacagccgggtacgccgtggagtgaagtgccggacaatttcctctgccctgagtgttctcttggcaaagatgtctttgacgtactggcgacggaggcaaaatgagtgatggcatcgtcatcatcggctcgggcttcgcggcccgccagctggtgaaaaatattcgtaagcaggatgcgcaaatcccgctgaccctcatcgccgccgatagcatggatgaatacaacaaaccggacctcagccatgtcatcagccgcggacagaaggccgacgatctgaccctgcaaagtgccggcgagttcgccgagcagtacactctgcgtctgtttccccatacctgggtaagcgatatcgacgccgaaaaccggttagtgaagagccacgataaccagtggcgctacgacaaactggtgctggccaccggcgcgacgccgtttatcccgtcggtgccggggcgcgagctgatgctaacgctcaatagccagcgcgaatatggcgcggcgcagagccagctgcacgacgcgaagcgcgtgctgatcgtcggcggcggcctgattggctgcgaactggcgatggatttctgccgcgccggtaaagcggtaacggtagtcgataactccgccagcgtgctggcggcgctgatgccgccggaggccagcagccgcctgcagcatcggctcaccgagatgggcgtacatctgatgctgaaaacgcagctggaggggctggagcaaaccgccgacggcattcgcgtcagtctcgatcgccagcgcgcgataaccgtcgatgcggtggtggccgccgccggcctgcgcccggaaacgtcgctggcgcgccacgccggactgcagattaaccgcggtattgtggtcaatagccagctgcaaaccagcgacccggcgatttatgcgctcggcgactgtgcggaaatcaacggcgtggtactgccgttcctgcagccgattttactcagcgccatgtgcctgagtaaaaatctgctggcgcaggcgggagaactcaagctgccgccaatgctggtgaaggtgaaaaccccggatctgccgctgcatctggccggcgacacccgccgcgacgatctgacgtggaatatcgtggccgccaaagaggggctggtggcgaaaggcgtggatgccgaaaaccagctgcgggcctttgtggtgagtgaagacaaaatgaaggaagcctttgcgctgctcaaacaactggtaagttgatggttttcccggcttgcggcgtaaacgccttagccgggctacggtattgtcctggtagcccggctaagcgcagcgcaagccgggaacatatccagcctagcgcgccagattgtcgtagccgcgccagcgatagttaagcaccgatagcgcccaacaggcgacaaacaacccgaccaccacaaatccggcgtcgccgaggttgtcgtttaacgcccctacccagcgccatattccgccgctgagcgcaaacttatccatcagcaggcccagcgcttccaggccgccgataaacagcgccaccaccaccgaggtgccggtgatggtcatgttgtaatagagcttgcgctgcggtttgctgaacgcccagccgtaggcgccgaccatcagcacgttatcgagggtatccaccagcgccataccactggcgaacagcgccgggaagaccataatcgaccagacggaaatcccgctcgacgcaccggcggcggagatacccagtacgccgatttcggtggcggtatcaaaaccgaggccaaacaggaaaccgaccaggtacatctgccagctgcggcttatcagacggaaggtcttgccaaacagccagctcatcaccccgccgccgctgacgatttcgtcgctcaccggctctccgcgcttccatgcccgaaagctgcgccacacgctgcgtaaaatcaccaggttgataaaggccatcgccagtaaaaacagggccgacacggcggtgccgataacgctaccggtatcatgcagccagctcatctgcgtgctgaaggcggtggcggtcgcggcaatcgccgccgaggccagcaccacaatcgatgagtggcccagcgaaaaccacgccccgacggcgaaaggccgccgcccctgctgcatcatcttgcgggtcacgttatcaatcgccgcaatatggtcggcgtccaccgcgtggcgcaggccgtagccccaggccagcaggctggcggccatcagcgcgccgctgtcgccaaaggcctgcagcgcccagcaccaggccagaaaattcgccgcgatcaaccccagcaccagacccgcggcgcgcggctgctggcgtaaaactgtcattatcatggttgtattccttgagcctgcccgcgggcggcggcgatcaccgcctggccataggcgattgcgccgtcgccggccggcaactgctgtgcaaacagcagagtaaaatccgccagataaaaggtcaatcgcgccgccagcaggcggttatgcagcaccccgccgctgcagaccatcgtgtcgatgccgcggacggtggcgcagtcgcgggccatcgccgccagtccacaggccagggcgtcgtggaatgcccaggctttctgcgccggagtcgcctgccagctcagccattgccgccagaaggtcgctaaatccagcgcgtcgtcgcgccacggcagcgtaaccgggtggctgacgccggggcagctggcggccagcgcctccagccgacaggccgcttcgccttcatagctcaggctctccggcgcgcaatccagggcgcaggcaacggcatcaaacagccgtccgcaggatgaagcgcgcggcgcgttaatcccgcgctcgatggcctgcgccagcagcggccagttgcgctggcgcagggtggcggcctgcggataatcctgccagtcagggacaaaggccaaacagtgggccagcaaatttcgccacggctggcgtgccgccaggtccccccctggcagcgcgacggccggcagcccgccaagatgttcgcattcgcgatagttgacccgcaggcactccccgccccacagcgcgccgttctcccccataccaataccgtcgagtgtcagggcgataacgtccccgccgtcaagcggccagcggtgctccgccaggcacgccgcggcgtgggcatggtgatgcagcactgtctccagcggcaggggcagggaggccgcccactgcgttgagcgatagccgggatgggcatcaaccaccacccgctgcggcacaaacgcgtaaatgctctgcatcagctgcagggcgctgcgccactgctgttcaacaccttcctcgccaagatcgccaaagtgctggctcagcaccgcttcgctgccgcgcgccaggcagaaggtatttttcatatccgcgccgagagccagcagcggcgggatgtctcctagccccggcggcagcggcagcgcgtccgggacgtagccccgggcgcggcgcagcatttcaccgcttgagcgcaccagtgaatcatccatccgctgtacgatgtcgcgattatgcaagagaaagccgtcggcaatgtcggctaactcattgagcgcctgagcattacttaacgccggcggacggccgctaaggttgccggaggtcattacgatggggcgcgccagcccctgcagaagcaaatgctgcagcggattagacggcagcatcaccccaacttccgcaagccctggcgctatttcgtcgcacaggccggagacctgcgctttggcaatcagtacgatgggcgccgccggggagcccatcagcgccgcagcggcggcgggtaagcccgttgccgtcggcagcattaccgccagcggttttgccgggcggtgttttcgcgcccgcagcgtggcaacggctgcggggttaccggcatcgcaggccagatgaaagccgccgatgccttttatcgccacgatgtcgcccgccgccagccgggcgatagccgcctgcagcgccgcctcgccgtccagcgtttccccctctgcccgccattccagtcgcggcccgcagtcggggcaggccaccggctgagcgtgaaaacggcgatcggcaggatcgcggaattccgcttcacaaggggaacagagcgggaacggcgccattgcggtgaagggccggtcgtagggcatggcgcgaataatggtcaaccgcgggccgcagtgggtacagttgataaaggggtagcggtagcggcgtgcccggggatcgttcatctccgcgaggcacgccgggcaggtcgcggcatcgggcacaatctgagtccgcatccgtcccgccccgctctcgcggatggtgaaatcctgcggcgtggccgcccagcgatagggaatgcaggcggtactgtcgatccgcgccagcggcgggcagtggtcagccagagcggcagtaaaaccgtcgtcgcccccgaccagccgcaccagtacgccgtcgccgtcgttacagacatcgccgcagcgggcctgcgcccgggccagctgccagacaaaggggcggaaaccgaccccctgcactttaccgcgaatgcggatttgcaccccgttcatgccttgacttaccaggccagcgccgtacggcgacgtttctcgatattcatctgctcaagtttgttgcggtcaacgcacaccagggcgtgcgtcgggcacacttccatgcaggccggaccgctctcgcggtggaagcagagatcgcacttgttggcttcggctttttccgccacgacgttcagtccggcgccgctatggcggatcaccgggcgcaccaccacctccatcgccccgtacgggcaggcgacgacgcaggttttgcagccgatgcaacgctcctgcatcacatggacaaagcctttatcacggctgatggcgccgttcgggcagacgttggcgcagggggcgtcttcacactgacggcaggcggtcgccgtggaaacattgacccctttgatcacgtgaatacgcggctgaaaggtgtgaggcgtcagggaggcgcagtcctgatgttcctgatgggataccacgcaggccacttcgcaagtgcgacagccgatacatttgctcgcatcggcgataatgaaacggttcatccatttctccagcagtaagaaggttacgcgccggagtatgcataatacgttccaagtttttaatatattgattataaagactattatagctgggctttgctgtcatcgtcagtagtgacgatgacagctgacgacgtcaggcacaggggcccgccaccagcgactcgcgttcaatcagcgctccgggaaagctttgctgaaagttgaattccccgccatccagcataaagatcagccgattgatgctctctttaatcatctccgtcaccggcacccggacgctggcgagcgacggcaccatatacggcgcaagagcaatatcgtcaaaccccaccaccgagacctgttccggcaccttaacgcccagctggtgaagctgcttcatcgccccgatggccatatcgtcattgctcgccactagcgcgctgtaggtaaccccgcgctgacgcaggctctccacccccgccgccccggtttccggcgtccagcgcccttcggcgataagcgcctcgttcagggcgatgccgtggccagccagcgcgtctttgtagccggcgaggcgttcgacgccggtgggcgagtcaagggagccggtaataaaggcgatatcgcgatggccaagcgcaatcagccgctccactacccgcatcgccgaggctttttgatcggaccagacgcagtggctggcgtggcggcgcaggcggcgattaagcaccatgatcggctgcgagtggttctcaacgatctcgtccatctcatcaacggtgagaaagcgcgggtagatgatgatcgcatcgcagcgcagatccagcaggtactggatcgcctcccgctcctcttgcgcgctgtgcttgccgtcggccaggatcagctgccgccctttatcctccgtcatccgcgccacgtgatacagcagttcgctaaaatagacgccgtggtacagggtattggtcaccaccaggccgagggtttgcgtggttttggtcgccaggttgcgcgccagcagatttggccggtagccgctctccgccaccgccttaaacacccggtctttggtctcctggctgacatagccgttgcccgacagcacccgcgaaacggtcgccttcgatacccccgcgcgctttgcgacctccagcatcgttgccatgtgattcttcctgttgcaaaagttgcaggcagtgtactgcacgtttcccgcttttacagcactcccctgttcaccaccgcgatccggctcacggcgacgcttagcgatcaaaatcacaaaattgagatcatgtttttttatttcttgtgcaattaaatgaaactcaccatgattttgtggaaccggtttcctataaaaacatggtatcgcccggcgatgcggggcggtggcagattagtaccctattgataaacaggataaaatccgatgtcgaaaaattatgcagccctggcgcaacagatagtcgcggcaatcggcggggtcgacaacgtcgccgccgttacccactgcatgacccgtctgcgcttcgtggttaaagacgacgaacaggtcgatagctctaccctgaaaggcctggccggggtgctcggcgtcgtgcgcagcgataaccagtgccaggtgatcatcggcaacactgtctcccaggcctaccgcgaggtggtgaatctgctgcctggcgacctgcgcccggctgagccgcagggcaaagcgccgctaaccctgaaacgcatcggcgccgggatccttgacgcgctgatcggcaccatgtcgccgctgatcccggcgattatcggcggatcgatggtcaagctgctggcgatgatcctcgagatgagcggcgcgttgccgaaaggctcgccgacgctgaccctgctggcgcttatcggcgacggcgcatttttcttcctgccgctgatggtggccgcctccgcggcggtgaaattcaaaactaatatgtcgctggctatcgccatcgccggggtgctggtgcatcctgggtttatcgaattgatggccaaagccgcccagggagaacacgttgaattcgcctttattccggttaccgcggtgaaatacacctacacggtgatcccggcgctggtgatgacctggtgcctgtcgtatatcgagcgctgggtggatcgcattaccccggcggtgacgaaaaactttctgaagccgatgctgatcgtgttgatcgccgccccgctggcgatcctgctgattggcccgctgggcatctggatcggcagcgccatttccgcgctggtgtatacgatccacagctatctcggctggctgtcggtggcgatcatgggcgggctgtggccgctgttggtgatgaccggtatgcaccgcgtctttacgccgaccatcattcagaccatcgccgaaaccggcaaagagggtatggtgatgccatcggagatcggcgccaacctgtcgctcggcggctcttcgctggcggtagcgtggaaaaccaaaaacccggagctgcgccagacggcgctggccgccgcggcatcggcgattctggccgggatttccgaaccggcgctgtacggcgtggcggtgcgcctgaagcgcccgctgatcgccagcttaatcagcggctttatctgcggcgcggtggcaggcattgccggactggccagccattcgatggcggcgccggggctgtttaccagcgtgcagtttttcgatccggccaatccaatgaccatcgtctgggtgtttggcgtgatggcgctgtcggtggtgctgtcgtttgccctgacgctgatccttggctttgaggacattcccgttgagcaggccgctgccgacgccagagcgcgccaggccagggcccaggcatcccacgcctgaatacactattgataatgaggtaatgcatggcgagtttcccacagggatttttatggggcggcgcactggccgccaaccagtctgaaggcgcttatcttgaaggcggtaaggggctgaccaccgtggatacccttccccacggcgcccatcgcctgccggtaaaattaggcctggagaagcgctttacgctgcgtggagacgaattttaccccagccaccaggcgatcgatttttaccatcgctataaagaagatatcgccctgatggccgagatggggttcagcgtctttcgcacctccatcgcctggagccgcctgttcccacgcggcgacgaacagcagccgaatccgcagggcatcgccttctatcgctcactgttcgaggagtgcaaaaagcacggtatcgagccgctggtcaccctgtgccattttgacgtgccgatgcatctggtgatggagtacggctcctggcgcaaccgcaaaatggtggattttttcagccactacgcccgcacctgctttgaagcttttgacggcctggtgaaatactggctcaccttcaatgaaatcaacatcatgctgcacagcccctactccggcgccggtctggtgtttgaagagggtgaaaaccaggagcaggtgaagtatcaggccgcgcatcacgagctggtggccagcgcgctggcgacgaaaatcgcccatgagattaacccgcaaaatcaggtcggctgtatgctggccggcggtaatttctacccttactcctgcaagccggaagatgtatggatggcgctggagaaggaccgcgaaaacctgttctttatcgatgtccaggcccgcggcgcctatccggtgtgggccgcgcgggtgttccgggaaaaaggggtcacgattgcgaaacagccgggcgatgacgagatcctcaaaaacaccgtcgatttcgtctcctttagctactacgcgtcgcgctgcgcctcggcggagatgaacgccagcaacaccaatgccgccaacatcgtcaagtcgctgaagaacccgcacattccggccagcgaatggggctggggcatcgacccgctgggcctgcgcatcaccatgaacatgatgtacgaccgctatcagaaaccgctgttcctggtggaaaacgggcttggcgcccgcgatgagatcgatgccaatggggacatcaatgacgactatcgcatcagctacctgcgcgagcacatcagggcgatgcgcgatgctatcggcgacggcattccggtgatgggctacaccagctggggctgcatcgatctggtctcggcgtccaccggcgagatgagcaagcgctacggctttgtctatgtcgatcgcgacgatgccggcaacggcaccctggcgcgtaagcgtaaaaagtcattcttctggtaccagaaggtgatagccagtaacggcgccgatctcgactaagcaccctcgcccacgcgcgcccgttccccgcgataaccgggggacggacgtcggctatctgttgcatccattacatgcttttttctcgagcctgattccagtttctggtttgccacctgtttacaataactggtattttatccagtacttttacaggggtatcttcagcaaggagcacatcatgagcgcacagcaccctaccgcagccagagggatagccagggccattcgccagttaaccgtgggatatgtcagaaaacgccatgaggatcgcaaaacgcgggagacgcggcgctacacccgccacgcggcattaagcttaaacggcgactggctggagcaggcggggtttccggtcggcacgcaggtcagagtctcggtgtcgcccggtaaattagtgatagagaatcttgagctggcagcgccgggaacggggctcccttccggccagtcgtgcgccggcggagagcccggttcgccgcagggctagtcgtccgcggcctccagctgagtaaagccgcccttgccctgccagcctgccagctgctgatacacccgggcaacggcctctttcaccggctgggtcatcggataataaaaaccgacgatatccggctgaatgccgaggaaaatcacctcgccgacgtcttctttcagctgatcgaccagatagttgagcggcatgttatgggtggtcatcataaacatctcggcgatgtcgtcgggatcgatgatgcgaatgtcgccggggtttaggcccatatcggtggcatcgacaatcagcaggcgttcggggcgtaattcgcggatcgccacgatgtcgttttccggcgcgctgccgccgtcgatgaccacccactggccggccgggttagccgcgcacatctccgccagcagcgggccggcgccgtcgtcgcccatcatgctgttgccgacacagagtaaaacgtcagtcacgtaatctcctcaccatcaggtagatggcgctctcctggtgaatatcatgcagcatgctgagcagggttttgctccacgcctgctgctgcggggtctgcgcagactgcgctttatcaaaggcgttggccagcatcgccacatgactgctgtcgatgacgatttcgccatacttcggcacgccctccattttgcgccgcgcggcgcttccggcctcaagggtggcgatccatgccagatacgcgtcccacgggcagctcagcgccgcctccagacagtcgatgacgccgaggtggtggccaatcgccaggctgtaatagaccacctgctgcgcctgatccggcgtggcgtcgttctcatcaataaatttacggctcagctgactgaacaccaccgtctcgctcatcggatacgcgccccctcgaccacctggttgagatgggtgacgatctcggtcagacgcggatctttctccgcctccagccagcgcagcacctgactgtcgccctggccaagcagacgcatatagtcatcggcaatctgccgtccatagcgatagcccgccagacgccgcgcttcgcgatcgatgcgcacccgcagaggctgcaccatatcggcatgcagcagctcggtcggctgttcgtcgagctcacccggcagacgggcatgaattttctgctccagcaggccaagcgccatggcgaagccgtacagcgtggcggctggcgtcggcgggcagcccggaatatagacgtcgaccggtacgattttatcggtaccgccccagacgcagtacaggtcgtggaagatgccgccgctgttgccgcaggcgccgtaggagatacagatcttcggatccggcgccgactgccaggcgcgcagcgccggggagcgcatcgcgcgagtcactgccccggtaaacaacagaatatcggcatggcgcggcgaaggcaccaccttaatcccgaagcgttcagcgtcgaacagcggcgaaagggtggcgaaaatttcgatttcgcagccgttgcagccgccacagtcgacgcggtagacgtaggccgaacgtttaatcttcttcagtagcgaggccttcatgctggcgatggattcatccaccgtcatcggcacgggaatgccgttttcatcgcgcgggccaagtaaagtactcatcagctggcctccctcatatggcgggtcagttcaatacgatcggacggcaccaggcatttctggcgcttgcattccgggcaggtttcgaagctttcgcggtgcagctcggcgcgggtatcgccgttatgcttgagcagcgcgatggcgtagtcgatctccttctgcaccgcgaacggacgctggcactcccggcagtggcagatagcgaagcgcgactgctggaggaaatcctctttcttccacaccgccagctcatactccggcgacagcttaatcgccgccgtcgggcacacctcttcacagcgaccgcagaagatgcagcgcccgagattgaactgccacgccagctggttagtggccagatcgatctcgaccgtcagggcgttcgacgggcaggcgttcacgcaggccgcgcagccgatacactgctgtggcgtatgctccggcttgccgcgaaagtttttgtccaccggcatcggctccagcgggtaggcgtgcgtcgcggtgccggtcttaataacttttttaataaaggtaaacatggcgattccttatttcagcggcgagtttttacgctcgatgctgtagcgctccagctctttgtatggcaccactttgctcttcttcttgcgtacatcgaccacggtcatgcggtcagtacaggagtagcacgggtcgaggctgccgatgatcagcggcgcatcggaaacggtgttgccgcgcagcatatagcgcagggtcggccagttggcgtaagtcgccgcccggcagcgccagcggtacagtttctggttgtcgccggtcatgctccagtggatatcgtcgccgcgcggcgcctcggagaagcccagcgcgaagcggtgcggaatataggtgaacccctccaccatcagcgggccgcccggcaggttatcgagaccgaaatcaatcatattcagcgcggtgtaaacctcgttgatccgcaccttgaggcgagatatcacgtcgcagccctgttcgctgtgaacttccatcggcagcaggccgtaaccgacaaacgggtggtcggcgcgggtgtcgcgggcgtggccgctggcgcgcaccatcgggccgacgttgctgaagtcgcgggcgatttccggatccagacggccaataccgacggtacgctgttccatattcggcgtgctgagcagcatatccaccagctcctgcacgtcgcgacgcatctgctgcgccagctgacgggtctggatcatgtcctctttcagcaagtcgcggcggatcccgccgatcaggttcaggccgtaggttttacgcgcgccggtaaggatctctgccatcttcatcgaggtttcgcgcacgcggaagaactgcataaagccggagtcaaagccggtaaagtggcaggccagaccgaggttcagcaggtgcgagtgcaggcgttccacctccagcagaatggcgcggatcatctgcgcccgctccggcaccacgatgcccatcgcgttctccaccgaggtggtgtaagcggtgctgtgggcgaagccgcagatgccgcacacccggtccgacaggaaggtcacttcgttataacccatgcgggtttccgccagcttttccatcccgcgatggacgtagaacaggcggtagtcggcgtcgataatgttctcgccgtcaacgaacaggcggaagtggccaggttcatcagaggtgacgtgcagcgggccaatcggcaccacgttgtttttcttgctgccgagctcgttaataaactcgtaggtttcggcgtcggtggtcggcgccggacgctggcgataatccatgctgtctttgcgcagcggatagagttcgtccggccagtcgtccggcagcaccagccggcgttcgtccggcaggccgaccggcaccaggccgtacatatcacgcacttcgcgctcgccccataccgccgccgggacgcgcggcgtcaccgacgggtattccggtttgttggcgtccacttccacgcgcacggtgatccagcatttggtgccctgctccatcgacagcacgtaatagaccgcgtagtggccgttgagcttacgttcatcgttgccgaacagcaccgacagccagccgccctgctggtagtagagaaactccaccacttccggcaggtagttgaccttcacggtgatggttaactggtctttagtctgccaggcttcgtccagcaccacgccgggaaaggcctggtgcagcgccgcaaggtagtgttgaccgattttttcttcagacatgctcaaactctcttaatcacgccaccagcaaggagacgaaagctaaaaaggcgaaaccaaacccggcccaggtgacgcgggaggtggcacaaaaacgcagacgcgccatgctgttttcaaacagcgcgataattagcaccccaaccaccagcttaacgatggcgaccaccagcgccagcagcaggccgccgacgctgaagctggtcatctggccccacggaaagaagaccccgacaaacatctgcagcaccaccagctgtttgaggctgatgccccacttcaggatgccaaagccgctgccgctgtattccgacagcggcccttcctgcagctcctgctccgcttccgccagatcgaacggcagtttgcccatctcgataaaggtggcgaaggcgcaggcgcataacgccagaatcagtggaatgctgcgcgacgccggccagtggtaaagggtatcggtgatggcgctgatatgggtcgagccggcgacctgcgccgccacccacaggcccaacagcaggatcggctccaccagcacgccgagcatcgcttcgcgactgctgcccagcgcggtaaacgggctgccggtgtccagaccggaaatggcaaagaagaaacgggcgatggcgaacaggtagatcagggtgatgagatcccccagcaccggcagcggggagtctaccgtcaccaccggcagcgcggtggcgatggtcagcatcacgcccaccatgacgtacggcgtcaggcgaaacacccagcccgaggcgtcaggaccgacgctctggcggcccagcagtttcaggatatcgcgatactcctgcagtacccccggtccacggcggttatgcagccgcgcgcgggcgacgcgaacgatcccggacaacagcggcgcgacggcaaacagcaccagcgcctgtagcaatgcaattaacagactcattctcaggctcctcgcgaaatgacaatcaccaccagcaccgccagctcaaccagcgcgatcccgcgcagcagcgccggcgccgaggccgattgccagcccggcaccagacgcaccgggttcagccagtgacgcagcttcagcaacggcgcaaaggcctctttcaccggcatggcaaagccgtgggccgttaccaccatcgactgctcgtggtcgtaaccgcagacccacgccgcgccgcgcgagcgcgccgccaggcgatcgcctttaaagaagatcatcagcaggaacggcagcagcgggcaggcgataagcagcagcgcgatcatcggctgcgacaccacgctcgttacctgagcctgcaccgggaaggcgccgctcaccagcggcagcagccacggcgcggcgatgccgccaacgaggcagaaaaccgccgccagcaccacgctcagggtcatcagccagggggcgcaggtggcgttttccgcctctttcgtccgcggcgcgccgaggaaggtcacgccatagactttcgccatacacatcaccgccagtgcgccagtgatcgccaggccaacggccagtagcggccccagcagacggccaataaacaggtcgccagtgctcattttgaagaaggattgatagataacccattcgccggcgaagccgttcagcggcggcagggccgccattgccatcagccccaccagcatggcgagggagatcagcggcatttttttaccgatgccgcccagcttctcgatatcgcgatggccggtgcggaaccacaccgctccggcaccgaggaacagcgtggttttgaacaggctgtggttaatcaggtgatacatgccgccgataaagcccagcaccatcagcgtgctgttgcgggtcgccacgccggtgacgaaggcgcccagccccagcaggataatgccgatattctccagggtgtgataggccagcaggcgctgaatgttatgctccatcagcgcatacagtccgccgataaaggcggtgatcatccccagcgccagcagcatcacgccccaccacagcggcggcacgccgccggccagcgaaacggtcagcatgccgtacagaccaaccttcattaccaccgtggaaaacagcgcggcggccggcgcgctggccccggcgtgagcctgcggcgcccagccgtgcagcgggatcgccccggccagcagggcgaaccccaccagacccggcagccagagcagcgggttctgcatcatatccaccgcctgaaggttgatctgcgccagctcgagggtgccgtaggttgaccacaccagccagcaggtccaggccatcagcagagtaccgagacgccccagggcaaaccacagcttaccggaggcggcgcagccggtgagaaacgccgcgcagagcgccatgatctccgccatcaccaccagtgaaccgatattggtcaccaccaccgcgcaggtcgcggcggccagcagcaggttgaccagcgggccgttggccttcacctgcgggtggcgatgccagctaatattaaacagcgacaccggcagcgccgacaggccgatggccagcagccacagcgcgttgacgccccccacccgtatcgtcaggtggagaaactgcagcatgccgccgtggatccgctccggcatcagcagcgcggcgccgccggcgaccaccagcatggcgctggccaccgcgccgccgatcccggcaatggcgccgctgagcggtttgcgcatggcaaacagaaaggccagtacggcgctggcggcataccacgccaccgcctgattcactaatccaattacactcattccctctccccctgttgcgcctggaacagcgacaagtcgccaaggtcggtattaaaggtcagccggcgtttacgcttgctggcctgggcgatatcacggctatccaccagcatcagcgcgttggtcggacaggtccgcacgcaggccgggccctggtcatcgaagtggcagaggtcgcatttcacggcaatagcgcgcacgcccggtacccagtcgagcagcgagctgacgcgcgccggcgccggcggcgcggggggcgccagccgggtattggcattcgccgggatatccagcgggcggctgccggaaaattcaatggcgccgaacgggcaggcaatgccgcacagtttgcagcttacgcacaggctctcgttgagctggaccgcgccatcgacgcgctggatggcgttaaccgggcagacggtggcgcagggagcatcttcacagtggtggcacatctgcggtgccgattctttttcattacgcatcacctgcagccgcggcatagcctgcaggccgtgctggcgatgcgtctcagagcaggcggcttcgcaggtgcggcagccgatacagacagttgagtcagcaattacaaaacggttcaccgggtcatcctcgggtgaaagtcatttttgacgaaatcaggttgcgcaggtgtcattttcgacacgtgtcgacaccttacgatcagtgggtcagcgccagatggcttaaatccaccggttggtcttgttccatggcgtcatacagacggtcatagacggtggcgataatcgccagatagtgctccagcacctggtcgcgggagcggttgctgatgcggccgtccaccgtgccatccattgcgagggtggcctgagcaatcagatacttatcaccgccgtttttgttttcgacgtagtactcgatggtgtggctgttgaagccttccgcgagggcgacgaacacctgaaaatggccgaacagcacgaagcacagctctttgtccggcgcgcagctcatcgcgtgatgcaggcgggccttcgacaaggtgatcccctgaaccagcgagttacagtagatgtgccactgctcctgctgctgccggtgacggtcggcgatgtaatccgccttttcacttatttcccaaatagtcatatcggtttctccgtagcatgagatgcaccctctaagcatttttcatgccaggttttatttaattgatttaactatttttttatatcgacctctgccgatacgacatgtcgatgacagccccggggcgtcgacatcgacattgactgccacgacgatttcattctggcatcgttattgcataaaaggcgcatcgcgatacggaggcgactatgcacgaaatcaccctcagccagcgggcgctggaaattattgaacaacaggcgcagcaggccggcgcgcggcgggttaccggcgtgtggctcaaggtcggcgcattttcctgcgtggaagccagcgccctgaccttctgctttgagctggtctgccgcggcacgctggcggaggggtgcgaactgcatatcgccgaacaacaggctgaatgctggtgcgatcgctgtcagcagtacgtccatcttgtctcgcagcacgttcgccgctgcccgcactgcaataacgaccagctgcagatcgtggcggatgacggcttacagattcagcgtttagaattggagtaaattatgtgtacaacatgcggctgtggcgaaggcaacctctatattgaaggagacgaacgaaacccgcattccgcgttccgcagcgcccccttcgcgcccgccccacgccagacgatgaccatcaccggtgtcaaaatcgaccacttcgcccccacccgcacgccagagggcgacctgcattacggccacggcgaagcgggtacccacgccccggggcagagccagcggcggatgctggaagtggagatcgacgtgctggataaaaacaaccgcctggcggcacgcaaccgcgcacgcttcgcagcaaaacagcagctggtgctgaatctggtttccagccccggctccggcaaaaccaccctgctcaccgaaaccctcacccggctgaaaggacgcgccgactgcgcggtgattgaaggcgatcagcaaacggtcaatgacgccgcccgcattcgcgccaccggcaccccggcgattcaggtcaataccgggaaaggctgccatctcgacgcccagatgatcgccgatgccgccccgcgcctgccgctggctgaccgcggcattctgtttatcgaaaacgtcggcaacctggtctgcccggccagctttgatctcggcgagcgccataaggtggcggtgctgtcggtcaccgaaggcgaagacaaaccgctgaagtatccgcatatgttcgccgccgccagcctgatgctgctcaacaaagtcgacctgctgccgtatctcaatttcgacgttgagcggtgcctggcctgcgcccgcgaggtcaatccgcatattgaaattattcttgtctccgccaccagcggcgaaggcatggagcagtggctcacctggctggagacgcagcgatgtgcataggcattccgggacaaatttgcgccatcgacggcgtgctggcgaaggtggaagtttgcggtattcagcgcgacgtcgacctgacgctggtcggcgccgttgatgagcagggccagccgcggctcggccagtgggtgctggtgcacgtcggcttcgccatgagcgtcattaatgaagccgaagcccgcgacaccctcgaggcgctgcaaaatatgtttgacgtggagccggacgtcggcgcgctgctgtacggcgaggagcgataatgcgttacgtagatgaataccgcgcccccgaacaggtgatgcagctggtggcccatcttcagcagcgtgctcgtctgctgccgcataccgccgcgcgaccgctgcgcatcatggaggtctgcggcggccatacccatgccatttttaaattcgggctcgaccagctgttgccggagaacatcgaatttattcatggtcccggctgcccggtgtgcgtcctgccgatggggcgcatcgacgcctgcattgagattgccagccgcccgggagtgatcttctgcaccttcggcgacgccatgcgcgtgccgggtaaaaacggctcgcttctgcaggcgaaagcccgcggcgccgatgtccgcatcgtttactcgccgatggacgctctgcggctggcgcagcaaaatccgcagcgcgaggtggtcttttttggtcttggtttcgaaaccaccatgcccgctaccgccctgaccctgcgtcaggcgcgagagcgcaacgtcgataacttctactttttctgccagcacatcaccctgctgccgaccctgcgcagcctgctggaccagccggagaacggaatcgacgcctttctcgccccgggccacgtcagtatggtgatcggcaccgaggcctacggctttatcgccagcgactatcaccgtcctttagtggtcgccggtttcgaaccgcttgatctactgcaaggcgcggtgatgctggttgagcagacaatagcgcagcgcagcgatgtggaaaatcagtaccgtcgcgtggtgccggatgagggcaacccgctggcgcaggcggcgatggccgacgtcttccgcctggatggcgacagcgaatggcgcggcctgggggtcatcagcgactccggcgtgcagcttacgccagcctatcagcgcttcgatgccgaggcgcattttcgcccggcgccgcagcgcgtgtgcgacgacccgcgcgcccgctgcggcgaggtgctgaccggccgctgtaaaccgcaccagtgcccgctcttcgccagcacctgcaatccgcaaagcgcctttggcgcgctaatggtctcctctgaaggggcctgcgccgcctggtatcaatatcgcagtcaggaaaatgaagtatgaaaagcgtccagttagcccacggtagcgggggacaggcaatgcagcagctgatcggcgacctgtttatgcaggccttcgccaacccctggctggcggagcaggaggaccaggcgcgcctcgatctggcggcgctcgccgcccagggggaccgcctcgccttctccaccgacagctacgtgattgacccgctgttctttcccggcggcaatatcggcaagcttgccgtctgcggtaccgccaacgatgtggcggtcagcggcgccatcccgcgctatctttcctgcggctttattctcgaagaggggctggagatggccaccctggaagcggtggtcgccagcatggccgacaccgcccgggcggcagggatcgccatcgtcaccggcgacactaaagtggtgccgcgcggcgcggcggataagctgtttattaacaccgccggcatcggcgccatcccggcggacgttcgctgggggacgcagcagattagcgccggtgatgtgctgctggtcagcggcacgctgggggatcatggcgccaccatccttaacctgcgcgagcagatggggctggacggcgcgctgtccagcgactgcgcggtgctgacgccgcttatccagaccctgcgcccgctgagcggagtgaaagccctgcgcgacgccacccgcggcggggttaacgcggtcgcccatgagttcgccgccgccagcggctgcggcatcgaactgcaggaggcaacgctgccggtcaacgacacggtgcgcggcgtctgcgagctgcttggtctggacgccctgaacttcgccaatgaaggcaagctggtgctcgccgtcgcccgcgacgaggcggaaaacgtgctggcgcatttgcggtctcacgcgttaggacgcgatgcggcgataatcggcgaagtggtcgtccgcccgggcgtacgttccgttgggctgtacggcgtgaagcggacgctcgatcttccccacgccgaaccgctgccgagaatttgttaacgacggcgtcgggtcccggatagcggctggcgccttttccgggctacaaaactgcgcgcacatgtagcccggctaagcgcagcgcgagccgggaaaaagccagcgtaattattttgcccaaaccagcgggcgcccatggatgggttaaagcggcaataaccgctttattaacatactattatttgtaccatcattttcttatgcgccgcgttgtcggcgcgttttggacgtaagcaatgtcgtatacaccgatgagcgatctcggccagcaggggctgttcgatatcacccggcttttattacagcagcccgatctggccgcgctaagcgaaaccctgacccgtctggtgcaacagtccgcgctggccgatgaggcggccatcatcctgtggaacgcgggtaatcaccgcgcggccaggtacgcctgcgatgaggccggccatccggtaagctacgaggatgaaaccgtcctggcccacggtccggtgcgtcgcttactctcccggccggatgccctgcattgcgatcatgaaacctttgccgatacctggccgcagcttatccgcagcggactgtatcgtccgttcggttactactcgctgctgccgctggcggcggacgggcggatctttggcggttgcgaattcctccgccgtgacaaccggccgtggagcgagaaagagttccagcggctgcataccttcgcgcagatcgtcgccgtcgtcaccgaacagattcagaaccgggtcagcaataacgtcgattacgatctgctgtgccacgagcgcgacaactttcgcatcctggtggcgatcaccaacgcggtgctctcgcgactggatatcgacgagctggtcagcgaggtggcgaaagagatccatcgctacttccggatcgacgccatcagcgtggtgctgcgcagcgaccgcaaggggaagctcaacatctattccacgcattatcttgacgccagccacccggttcacgaccagagcgaggtggatgaagccggcaccctcaccgagcgcgtgttcaaaagcaaagagatgctgctgcttaatctgcacgaacatgacactctcgcgccgtatgagaaaatgctcttcgagatgtggggcaataagatccagaccctgtgcctgctgccgctgatgtccggcaataccctgctcggggtgcttaagctggcgcagtgcgacgaacaggtcttcaccaccaccaatctcaagctgctgcggcagatcgccgagcgggtgtcgatcgctatcgataacgccctcgcctaccgcgaaattcagcgcctgaaagagcggctggtggatgagaatctcgccctcaccgagcagctcaataatgtcgagagcgaattcggggagattatcggccgcagcgaggcgatgaacaatgtgctcaagcaggtagagatggtggcgcacagcgacagcaccgtgctgatcctcggcgaaaccggcaccggcaaagagcttatcgcccgcgctatccacaacctcagcggacgcaacggtcggcggatggtgaagatgaactgcgccgcgatgcccgccgggctgctggagagcgatctgttcggccacgaacgcggcgcgttcaccggggccagcgcccagcgtatcggccgcttcgaactggcggacaaaagctccctgttcctcgatgaagtgggcgatatgccgctggaactgcagcccaaactgctgcgcgtcctccaggagcaggagttcgaacgtctggggagcaacaagctgattcagaccgacgttcgattgatcgccgccaccaaccgcgatctcaagcagatggttatcgacagggaattccgcagcgatctctactaccggctcaacgtgttcccgatccacctaccgccgctgcgcgaacgtcccgacgatatcccgctgctggtgaaggcgtttacctttaaaatcgcccgccgcatggggcgcaatatcgacagcattccggcggaaaccctgcgcactctgacgcgtatggagtggccgggcaacgtgcgcgagctggaaaacgttatcgaacgggcggtattgctcacccgcggcaacgtactgcagctctccctgccggagcgggatatcgtggaagccccgcggacgccggcggtcctgcctgaggaaggtgaggatgaatatcaactgatcgtccgggtgctgaaggagagcaacggcgtggtggccgggccgaaaggcgccgcccagcggctggggctcaagcgcaccacgctcctgtcacgcatgaagcggctgggtattaataaagacgaactggtgtaacctcgcgcgctccccctttccgcgccggtgagagggagcgctggcgcagcgcgctatttatcgctggtaaaaccgttgctggtcgccagttcggcaaaccacagcgcattgcgttttatctgtcgctcgccggtctccagatccagtcgccagaagccgtagcgccgtttgaaggcattgatccacgaccagttgtcgataaacgtccactggtgcacgccaaagcagttcgcgccgtcggctatcgcccgatgcagctgcaccagatgctcctccatcagctggatgcggaaagtatcgtctatcaccccgtccgccccgggctcgccctctgattgtcgatccatcgcgatgccgatttccgcgagataccacttaatattgccgtagttatcgcgaatattggcggcaatgtcatagatcgcctgcggcaggatctcgttgttatcacgataaggattaaagcggccctgcgggttcaccgcgttttcgaaatagtattccggggtgaaataatcgaggtcatattcgctctcacgcgcttttacccgccgcggcacataatagtttaccccaagaaaatcgatatccgcgctgaggatcaacgccgcgtcgtctttgctggtcgtcggcaggcagtcgtgggcggcaaggatctcgcacagcgctttggggaattcatgttttaccagcgggtcaaggaagctgcggttaaaaaacaggtcggcatacccggcggcttttttatccgcgtcgctgtcggtgagggtatagctcggggtcaggttgagcaccacgccgatctcgcccgccagcgccagttcacgataagccgttaccgctttggcgtgcgccagcataatgttaaacgccacctgcgccgccagccggccatctttcttacatggatagtggaagtcgtacaggtagcctccctcaaccggcacaatcggctcgttgaaggttatccagtatttaaccttatggccaaacaggctaaaggcggtgcgggcaaagcgggcaaacagctcggctacgtgcgccgattcaaagccgccgtactgtttctgcagcgcttccggcatatcaaagtggtagagattgatcatcggctcaatgccgttggcgatcatctcatccagataggcgtgataaaaacgcaccgcgtccgggtccggcgcgccggtttccaaatcagcgatcagtcgtgaccactgtatcgaggtacgaaatgagttgaagccggtctgtttcatcagcgccacgtcctgcggatactgatgataagtatcacacacggtctgcggccctacctgctgataaaatcgctccggctgttcggcaaaccaactgtcccagatggaacgatggcgcttattggtgaccccttccgtttgcgggccggacgccgccgccccccacaggaacccttgcggaaactgatactgctgcataacctctccttcgaaaaaaggctgcgcccgtctggcgcagcctgaacgtactactcagcgaccacttcgatcgatttaatgaacatatagccccagtcgccggcgaagcggccgaagtcaatctgattgctcccggctttaagcgtcaccggtatccgcagctgctggccctgctcatccgtctgcgggaaggccacggtctgcggagcgcccccgttgacgacaaatgagttctgcttaccgccccatttgccgttgaaggttacattgagcaggaactgaccgctccacggcgcctgcacctgccagctgaccttatccccctcgttggcaaatgggccgaggaagccgtcctcgccaactgtcagcgcgtctttatcactcttcatcaccgtcagccgcccctcagccacgccataaacttcgccgtgataacgacagaaatccgctggcgctttccccgccgcctcgcccaccgtcacggtcacggttttgctgcttttcaacagcccatcgtccgccgtgaacgtcagcgcataggtgcctggcgccgcaaaccaggcccgggtttgagcccgatcggcatggcagaaatgcacctggccatcgccggcgtgctgccagcccaccttaacctctcgcgacggcaggccatcgtcctgccagctggccgtaagctcgacgccctggtcctgcgtggtggttagggccggttccagcgtgacaaccggtggctgattctcctcgctatgctgcacgctaatcacattggaaggggccgaacgaccactctcgtttttcgccgtcacccggtagtaatacgtgtgcccgagctgaagctgacgataatcgtcgcggaacagaaccatggtttccggattccattcgttaacgccatcggagatatcccggcccaccaccgtccacggcccggtcggtgaggcggcgcgttcgacatcgtagctgcgtcccaccgcagcgcccatccagttgatcgcgaagggcgaggtggtctcgcgcagcaaaggcgcctccggcttcggcagcggcgccatcgtctgctgcccggccatctgcgccgcggcggtgcgcaccagatcgaccaccgcctgctcctggttcgcttcgccttctttggcaaaccccggcaggtggtagctgtagtgcccggtcgactccttatgccagtagaagccgccgtcgtgacgatggccgcggaagccccagataagcccgccggcggcttgcgccccgttgacgtcgctgtgaacaatcgactgcataatggcgttcagttgatccgccggcagcaggccaaactcgccgacgagatagactttttgtccgccgacggcgcgcagatcctgcgtcacctgcccgggatggttattatcggcattggtgtaatagtgattgctgacgatatccacattggggtcggtcaacgcaaacggattaattttcttataggtgccatccacaaccagctgatgaggggcccactttttaatccacgccgcggtctgatgcaggaaatcggcgttggtatcctccagctcgttaccggtttcccaggccatgatcgccttttcatcataataggcgcggccggtgacagtatttgtccgggtgataacctggcggatcacatccagataggctttgaaggtcttgctatcggtccgataaaagtcttccgctttttcatgatagaacgccgccagctgctcgcgcccgccccaccaccaccagtggtcgataaacggcaggatcagacgcaatccctgtttatccgcttcggcaatcatgttgtcatacacccgcatggctttctcattcagccgcggcatgccgtccgccgtttccggcgccagaatatgggtctcacgcccgcaggccttatcaaattcctgctgcaccgacagcacgtagacgcgctgggctttcgccccggtttgcaccatcgcctggatccagttttgctgctcctgggccgttggccatttaaagtattgcccccagccgcgcgggtctgccctgcaggggccgcgggcgtcgtcttcaatgcggtgcagctccggcgcgtggatcccggcgaaacgaaacaccttgtcgccgtccttgagggtggcgccgtcgcgagtgataaagtgcgtaaagtgcgagcgctcggcggccagcgccccgccggcccccagcgcggacagcagccccatcagcagcaggtttttcatcggcttcatcgttctctctccttagaaccagacctcggcctgtacgccgaagttaacggtgtcggtagagccactgcgggaatacccgccggcggtgatggtattggtatcccagttgtagttaccgtctaatgcatcggagacacctttatcccacttcgcgtaggtgacgaagaagcgcagctgcggacgcgcccagaaaccggagtcaaaggtcagcgttggcgcaacggtgactttggtcaggccgcctttgcctttgccgtttacccctttgtagtttttgtcatccaggtattcgtagcccagctcgtactgcatggcaaagttgcgggtgatctgatgataagggcggataccagcgacccacatcgagcgtccccagccattttcatcttctgtccaccagcggtagtttttatctttctgccagaaagcgaaggtcgagatctccaggtcgcccatcgaggccacgctatccagcaccactcgccaggactgggtgttttccaggttggcccagccccagccgtttttacccagcgagtcacccgccgccagccctttcccgtactgcaatgcgaggcgggagtatcctccggtcagaccatagaagccgtcaaagttataaataccggtcacgccatagcccttctcggcggaagttggatggttttcgttacggttcatgtggtggccgatcagctccagatcgaagcctgtccccgcgatctttttcagccacaggttgagagaatagtcatccgggtagccctgatctcccttatccaccgggtaggctttggtttcatcggtgggtgaaaaggcgtacaccccggcgtcgaagcgggcgaagccgagatccatgttgtcgaagccgcctccggtgccgttgtactgaatgtactcccagtcgaactgatggctggaggtgttggagctgctatagcgcttaccggcccagaaggtcatctccggcgcaaaatccagattgctcaactcggcgaacccttcacgaaactgtacgtcatggccatcgtcatcctgacagttccagtcggaggtgcatttcgactggtgagtgaggttggcctgcactttcgccaccacgccgctgtccgccgtcagcgtcacggtggggatcagttcgatcttggtgtcttcttcgttgcccagtcgccacttaccgtctggcatcaggccgacggagtccgcgcggttgccatcggagttcgccaggatcccggagcggatatagccatgcagcgcaaaatcatacttcggatcggcgcaggccgggctgctggcccctgccagcgagaggagagccagaggtattgagtgtttcagctttatcattatttttttcccacgttatgtttgttaacacgaaccgataacggaggggaaatttacggatcaaaaacggaaatgtacatccacttacggaaagcgctttccataattgcctatctggttcacaaaattagctctgcggcgaatatattcgtgagactgatcacataaaatgacaagaatgccgccgggcgccggcagtggagcggaaggaggagcagatgagcaggtgccgccgggggataagccgccgacggcgagaggatcagcgttcggtttccgcgagctgacgttcgtacactttgaagaaggggcgatagagcatccaggcgttaaacattgcgaacaggctcatgcacaaatttttccagctgccgttcgccgaccatgccgcccccagcggggaaggcatcgaccatggcagcatcgccaccgcgcgatcgagaatacccagctgagttaaataccatgcgatacaggcgtttatcaggggaacaaagagaaacggcagtaaaaaaaccgggttcatgatcaccggaaaaccaaacagtatcggctcgttgatattaaacagcgacggcagcaggccaatcttggccacgcttttcagctgccgcgagcggctacgcatcgccatcagcaccagcggcaaagtggagccaataccgccgatcagcaggtaaaaatcccagaacccctgcagataaatatgcggcagcgttggcgaacccgccgccagcgcctgctgattttcaaacagataggtcatccagaaggggttcatgatcccggtgatgatcagcgcgccgtggataccgataaaccagagtaagttacagataaataaagagataagtaccgccatcagcgtgtcggacgccagcaccagcggccgcaccgcttcgctgatcaactccggtacgatgcgtccggtggtctgcagcagtatggcattcatcacgcttatcgacagcatcaccaccagcagcgggatcagcagttgaaagccattgcgggtcatcagcggcacttcatcaggcaagcgaatacaccagccttttttgtagaaaaagcgaataatctcaatggaataggtgctggatatcagagcggtaaatatccccataccgccgagataaacattgctcaccgcagtctcgcgaaagccgataaacagcagaaaagccagacacccggttaaaccgcacagccgttccggcaggcggtactgtttggcgaggctggcgctggcgccgaaggcgacaatcagcgccaccagtccaatggtcagctgaaaggtcggcagcaggataggccgcagcagcaaatagacctggccgaaacgcgaggcgccgtcgatggaaacgggcggaaacaaaatgggaactaacaggctgccaacgatcacaaagggcatagccagcgcaaagctatcgcgcatcgccgtaatgtggttgttgcgcgtcagaacattcgccagcggcgccagccgctgctcgatgatgtccacggccacattcattaactgaatgttcatactcctacctttgcgaatggttgtctcgccgggatgatcgcccacaacaccggaaagtgaaagcctgccataggtgatcatggtcacaattaataaatccacaaacggaaagcgctttccgtaatgaatccattttgactatagtccgctcatccaacctcatcaggagcggtaattatgaaaaaaattatgttgtgttgttcagcaggcatgtccaccagcctgctgatgaaaaaaatgattgcggaagccgaacagcggggcctgccggtagagatcaacgcctatggcgtagcggagttcgccgaacaggtcggccattatcaggtggtgctgttggggccgcaggtgaaatacatgcagcaggatctgcaaaaacaggcggataaatacggtatccgcgtcgaacccatcaatatgatggactacggcatgcaaaaaggcgccgcggtccttgatttcgccctttcccttatcgaaaacaagaactaaggaaagatcatgagctctctgtacgctaaactgatcgacgtgatcgaacggcagatcacgcctatggccggcgcgatcggccagcaaaaatatgtcacctcgatccgcgatggctttatcactgccctgccctttatgatcgtcggctcgttcctgctggtgtttatcttcccgccgttttctccggatacgacgtgggggtttgcccgcgcctggctgcaattttcgctcgatcatcgcgatgcgctgatgctgccgttcaacttcagcatgggggtgatgaccctgtttatcgccgtcggggatcgccgccagcctcgccaaacaccatcatctggactcgctgaccgccgggatgttgtcgctgatgtcgtttctgctggtagccgcgccgctgaaagatggccagatctctactgcctacttctccggtcaggggatctttaccgccattctggtggccatctattccaccgagctgtacgccttcctcaaacggcataacatcaccattcgcctgccgccggaagtgcctgccggggtggcgcgctcgtttgaaatcctgatcccggtgctggcgatcattctgacgctgcatccgctgaacctgtttatcgaagcccagctggggatgatcattccggaagcgatcatgtcgctggtgaagccgctggtcgcggcttccgatacgctgccggcgatcctcctgtcggtgctggtctgtcaggtgctgtggttcgccgggatccacggcgcgctgatcgtcaccgggatcatgaacccgttctggatggccaacctgtcggtcaatcaggcggccatggccgctggcaccgctatcccgcacatctatgtccagggcttctgggatcactatctgctgatcggcggcgtcggctccaccctgccgctggcgctgatgctgctgcgcagcaaggccgtgcatctgcggacgatcggccggatgggggtcgtgccgggcgtatttaacatcaacgaaccgattctgttcggcgcgccgatcatcatgaacccgctgtttttcctgccgttcgtgctggtgccgatggtcaacgcgaccctggcgtacttcgcgctgaagctggacctggtcagccgcgtagtgtcgatgacgccgtggacaacgccggcgcctatcggcgcctcgtgggcggcgaactggagctttagcccggtgatcctgtgcctcatttgtatggctaccgccatggtgatgtacctgccatttctcaaagcttacgaaaaacagctgctggcccaggagcgtgaaaacgccgtcggccaggctgacaacgcggcgcaaaccgcttaacgctaacgattcagaggataatcatggaattagaagaacaggtgatggggatcatcatcaatgccggccagtcacgtagcctgtgctacgaagcgctgcacgccgctaaagcgggtgatttcgccaccgccgacgccaaaatgcaggaagcggcgcactattcccgcgaagctcaccttgtacagacccagcttatcgaagctgacgaaggcgagggaaaaaccaaaatgacgctggtaatggtccatgctcaggatcacctgatgacatccattctggcgaaagagctaattgccgaactgattgcgatttaccgcgcgcagccgcttcacgcctagcgccttgcccggccagacgcgctggccgggcctgattccccgaggtcactatgttacatcttggaatagatattggcggcaccaaaatggaagccgtactgctggacccggcgggcgaatgcgtccagcgcctgcgccggccgacccacaaagagagctatgacgcctttatgcgtcagctgctgaccctgattgccgatattcgcgcggtcagcccgcagccgttcaccctggggatcggcctgcccggggctatcgatccgcaaagcggacgcattaaaaactgcaactgcctggtgctcaacggtcacgatctgcgccgggatatcatgcagcagcttggccagccggtgtggatggcaaacgatgccgactgcttcaccctttcggaggcggtggatggcgccggcgccggagctaccaccgtcttcggggtgattatcggtaccggctgcggcggcgggatcgccgttcatcaacagctgctcagcggccccaacgctatcgccggggagtgggggcataatccgctgccgggctatactcctgagcgcgatggcccgccgcagccctgctactgcggcaaaacgaactgcatcgaaagctttctctccggtaccggcttcgcccgccgctatggggaacaagcccgtgcggaagccattgtcgccgcggcgcaaaacggcgatccgcgcgcgctggcccactggcgacactttatcgatgcctttgcccgtagcctggcgtcggtgatcaatattctcgacccgcaggtgattgtgctgggcggcggtctgtccaacgtcagccagatctatcgcgatctgcctgccgccatcgtgccgtggatcttctccgacacctgccgcacgcagatcaaaccggcccgtttcggcgacgccagcggcgtgcgcggcgcggcttggctgccccggcttcccggcgccgcgcaagggccgcggtagacacttttttcagcaggtatgttaagctaggcgaaaatgttcagacagaaaaagccatgccaacgattgatgatgtttcaagattagcgaatgtctcaagagcgacggtatcccgcgtgctgaccggcacccggggcgtgcgcgaagagagccgggaagctgtgctgcgggccgttgaagaactcaactatcgcccgagctttgccgcgcaaaacctcgccagtcagacatccagccacgttggtctggtgatttccgcgcaggacgaaagccacggcgcacgtctgctgccgctgctctctcaggcgctgaaagtgctgaataaaagcctgctggtccagtacgtcagcgacccggtagagcaggcggcggtaatcgacgatctgcagcgccagtgcgtggcggtggtggtgctgggcgccgttgccgccgacgcgccgcgcaacgttatcgcctttgaccgcttcggcgtcgccgggagcaacagccagggctatgacttcgcctttgccaccgaaagcgcctgccgctatgtgattggcaagggacaccgcaacatcgccctgctggtggacagcgatagcgacgatgccagccgtcagatgctggaaggctaccgcaacgtcctgcagaactactccattccttttaaccgccagctggtgctgacggccaacgatgacgtcgagcaggcgctgctgaccttaattaacagcttcagtaaatactcagtcattatcgttaaacgcgaccgctacgcggctgaggcgatgcgtctgctgcgcgaattcaccatcgccgtcccgcaggaggtctccctgctgagccttgaggattccccgctcgcctcgctgctctacccgccgctgacctgcatctcctggccactggaggcgctgctggataactgtattcagcgtattcgcagcctgattgacgaccggccaaccttcaccgccgagggccgctcgctggctggccgcctgatcccgcgccagtcggtcgccgatatctcttgatcttcgcccggttggcgccgggccagacttacctccccttttcgcgctttcgtttccgggctcattattacccacgcatgcaaataagaattattttcatttataaatagcttgtgctatataacatagcaatggctataaacgctgggaaattaaccacaccattgcgagggatcctatgctacacctgacaccgctgaaatcattgctgctggccagcgcgctggctctgctggccgcgacgccggcctcggcgcaggagaaattcagggttatcaccaccttcacggttatcgccgatatggcgcagaacgtggccggcgacgccgccgacgtgagctccattactaaaccgggcgcggagatccatgattaccagcccacgcccggcgatatcaaacgcgcgcagggggcgcagctgatcctcagcaatgggcttaatctcgaacggtggtttgcccgtttttatcagcacttaaaaggcgttccggaggtggtggtcagcgaggggatccagccgatgggcatcagcgcgggcccctatagcgggaagcccaatccccatgcctggatgtcggcagataacgccctgatctatgtcgataacattcgcgatgcgctggtgaagtacgatccgcctcacgccgacacctatcgccgtaacgccgaggcctacaaagagaagatccgtcagacgatggcgccgctgcaggccagactggcgcagctgccggcggataagcgctggctggtcaccagcgagggagccttctcctatctggcccgcgactatggcctgcgcgaactgtatctgtggccgatcaatgccgaccagcagggcaccccgcaacaggtgcgcaaggttatcgacaccatgaagaaagaacgcatcccgaccatcttcagcgaaagcaccatctccgataaaccggcgcgtcaggtggcgcgggaagccggggcccactacggcggcgtgctgtatgtcgattcgctgagcgccgccgacggcccggtgccgacctggctcgacctgctgcgcgtcaccaccgaaaccatcgtcaacggtatccaggacgggatgaggaagcagccatgaatgcagcgcaagcgggactgtatgtcgaccagctcaccgtcacctggcgtaacggccacactgccctgcgcgacgcctcgttcagcgtgccgcgcggctccattgccgcgttggtgggggttaacggctcgggtaaatccacgctgtttaaagcgctgatgggctttgtccgcgttggtcacggcgagatcgccatactcggccagccggtcaaccgcgcgctgcgccagaacctggtcgcctatgtcccgcagtcggaagagatggactggtccttcccggtgctggtggaggatgtggtgatgatgggccgctacggccatatgggctggctgcggcgggcaaagccgcgcgatcgcgagattgtcgatgccgcgctggcccgcgtgggcatgagcgagttccgccatcggcagattggcgagctctctggcgggcagaaaaagcgcgtctttcttgcccgcgccatcgctcagcagggtcaggtgatcctgctggatgaacctttcaccggcgtcgatgtgcagaccgaagcgcggatcatcagcctgctgcgcgagctccgcgatgagggctgtaccatgctggtctccacccacaacctcgggtcagtgagtgaattttgtgattatacggtgatggtgaaaggcaccgtgctggccagcggcccgacagaaaccaccttcactgccgagaatctggagcgggctttcagcggcgtgctgcgccacgtcgcgctcacaggcggggaagcgcaggttatcaccgatgacgagcggccgtttatcagccggcgcgcggcgggaggcccacgatgagctggctgctggagccgtttggctatcactatatgctcaatgcgatgtgggtgtcggcgctggtgggcggcgtctgcgcctttctctcctgctacctgatgctcaaaggctggtcgctgattggcgacgccctctcccactcgattgtacccggcgtcgccggggcctatatgctcggcctgcccttcgcgctcggcgcatttctctccggcagtctggcggcaggcagcatgctgtttttgcaacagcgctcgcggctaaaagaggatgctattatcgggctgatcttctcctccttcttcgggatcgggctgtttatggtgtcgctgaatccgacgtcggtgaatatccagaccatcatcctcggcaatattctggccatcgccccggaggatattatccagctggcggcgatcggctttatctcaatggcgattctgctgctgaaatggaaagacctgatggtgaccttctttgatgaacaccatgcccgctcgattggcctgaacacccgcggcctgaagctgctgttctttaccctgctggccgcctgcaccgtggcggcgctgcagaccatcggcgcctttctggtcatctgcgtggtggtcactcccggggctaccgcgtggttgttaaccgatcgcttcccgcgcctgctggctatcgccgtgtctatcggcagcctgaccagtttcttcggcgcctggctcagctactatctcgacggcgccaccggcggcattatcgtggtcgcgcaaacgctgctgttcctcatcacctttatcttcgcgccgaagcacggcctgctggccagccgccgccgcgccagggaggccgcatgctgaacctgttcctggccccgttccagtttccttttatggtcaatgcgatagcgatatcgatcgtcgtcgccattccctgcgcgctgctgtcggtgtttctggtgctcaaaggctgggcgctgatgggcgacgccatgagccacgcggtctttccgggcgtggtgctggcctacattatcggcatccccttcgccatcggcgcgtttatcgccggtctgctgtgcgccgtgacgaccggttttctcgacgataacagccgactcaagcgcgataccatcatggggattgtcttctccggcatgtttggcgccggactggtgctgtacgtagcgatccagtccgatgttcatctcgaccatatcctgttcggcgatatgctgggaatatccctccgcgatattgggcaaacgacggcgatcgcactggtgattgcgttgattatcggtctcaaatggcgggattttttgctgcacgccttcgatccaacgcaggctaaagccagcggcctgcgcggcggactgctgcactacggcctgctgtgcatgatcgccctgaccatcgtcgcgacgctgcagtcggtggggattattctgtcgatttcgctgctgattgcccccggggcgatcgcgcttctgctggtgagacgctttatccacgccctgctgctggcggtagcggtggccatcggctgctcggcgggaggggtgtggctggcgttctatctcgacagcgcgccagcgccgactatcgtagtgctgtttaccgcgctgtttgtggtcgcctttgtcgcaagcacgatccgcgatagtcagaaacagaaaacttcagcaattatccccggtggcggctaacgccttgccggggctacaagagcacgacttgtcgcccggctgcgcagcgctgaccagggaaagcagctactttttcggtcgatatttttccggcagcggcggcaccgggcgcctgtcgtccagcagatggcgaatagtgaggatcgggtggcgccagagcatccgcggcccggcccagcgcataatctgcttcatctcctcgcgcttcgccggctggtagcagtgcaccggacactgcttgcaggccggtttattctcgccaaacacgcacttatcaaggcgcttgtcagcgtaggcgttcagcgcctgatagtgcgcattatcggcctgcgcctcgggacagcgccgctggtagagggcaatcatccgctgaatcgtcattttttcccgttcgatacgcttccccatctccccgcctttcgtcttttttaagatgcatttatcatacaccttaatatccatacccgaccagactcactgcttcagatgctgaatcaactgcagggctgccccggacagaaccccgaaatggctgtaggcatagaaatcccggataaaaacgctgccctcgagctcaaacgggcgcagcaggccaagcgcttcttcgtgtcggtaaaccggggccggcatcgacgttaacagatcgctctcgcacagaaaggccttaatggccgaggatgaggcgcactcaataaccggctgcggacagggtagctgccgggcgcgaaagatatccgccaggatgttcattggcgtactagacggcggcggcatgatccacggatagtccagcatcgcctccagggtgacgtccgccgcctgatgcagcgggtggtgctgcctggcgacgatgcagatccggtcctgccagttaattttgccccgcaccacgattttctcatcatgcggtaagggaccgcagagggcgatatcgatgtcgtgcatcagcaacagcttatacagctcggagtcaatgcggtcgacgatccgcagatggatctggggatggtgctgatggaaagccgccagcttatcgatgaaatggctggtcagcagactggaaacgcagccaatccgcagaatgcctttcccggcgccacggatgagctcaatttcctcgcgcgccttttgttcggtattcagcatcgtcagcgcgtagggtaaaaaggcgctgccatattcgctcaacgccatgccgtgcttatgtcgttcgaataaggatgcgctcaggtccgcttccaggctcaatagcagtcggctcagtcccgactgggtgatccccattttctctgcggccagggtcatattgccttcgcgggcgacggtaataaatgcctgaatctgcttaaatttcattggcatgatatttactcattgaataaacggtttttgcatttcccctgcgcccttttttagcgaataaatatcgctatcaatacgctcaaaaatcaccggaacgcatacttcaaaaggatttatttatctcaccaccccggcaaaacacatttctgatccgaagataatttataatgagaatatatcaccatgacacagaacaatattctattaatttcaggcgctatattaccggtcatcattaccgtcatcatcggctatattagcggtaaacgaaaagactttaactggcagcaggcaggagacatcaataaaattgtgatgctctacgcattgccgctaagtattttcagcaatatggtgatgacgccgcgacacatcgtcatgaccatgggcccggtcgccgtggctatcatcctggcgctgattctcagcttcgtcattcccttactggtcgcccgctatctgtttcgacgcgacctcgccctcagtacgctgcaggcgctggccatcggctcgccggcagtcccgtttatcggcacctcagtgctggcctttttatttggcaccgtcagcgcgtcgctgatcaccgtgtccagcatcacgcaaaacgtcttccagctgccgctggtgatgatactgatgtcggtcgccaccggcgataagagccagcatatttcctttggcgcacgggtggtgaacgccattaaacaacccgtggtctggtcgccggtgatcgccctgatcatcgtgctggcggatatccatattccgcagactatctcgatgtcgctgggtctgctgggcaaagcctctggcgggctggcgctgtttgccgccgggatcgtgctctatacgcgcagcattgttatcaccaccgctaccattatcaccgttatcgcccgcaatattctggtccccggcgcctgctatctcattttattaaaaatgggcttcagcatggagcaaataaaggaagtcgtattgacgatggctatcccggtaggctccatcgcgataattattgctatgcagtataaaaccggcgagcaggaaatggcctcgacgatggcgctgagtattattgcctccatcattacgatgggcggatttattttcttaaccttttaattaccgcgattacaccgcgtgaatacggagagaatatggcctctatcacattatcggctgctgaacttttactgcatcggctacaggcgctggacgtggcgtatatttttatcaactcgggcaccgattatcctccagtcattgaagcctgggcaaaggcccgggcgaccgggcaaaaggtaccggagttagtgatctgcccgcatgaaaacgccgccatcggcatggcccatggctattacctcggcaccggcaaggtgcaggcggtgatggttcacaccaacgtcgggctagccaacgccgcctgcggcgtcatcaatctggcgaacagcaatattccggtgctgatttttggcggccgcacgccgataagcgaacattcccacttcggctgccgtaatacgccgattggctacggccaggagatgcgcgaccaggcggcgctgatccgcgaatccgtgaagtgggattttgaactgcggctggccgatcagatcggcgagcatgttgaccgggcctgggcgatcgccagctccctgccgaaagggccggtctacctgagcttaccgcgtgagccactgtgcgaaacctttgccgtcgatgaggccgcgctgcaggctggcccttcgcagcagccggtccgctatgcgccagtccgggaagatatcgcccgcgcagccgaggcaatcgcctgcgccagacacccggtcatcttcgcccagcgcggcgcccgaacggcggaaggctttgcgcgcctcgatagtctggtgcgcgaatgggcgatccctctggtggaatactggggcaccgaggttaccctgagcgccgataatcccctgctcgccggggctgatcccagcgtctggctcgctgacgccgatgtgattctggtggtcgactcgcaggcaccatggatgatcgccgagggcgactgtcgccaggactgcaccgtgatccagatggggcccgatccgctcttctcccgctacccggtgcgcggctatcgcgcggacatcaacctggcgggcgagaccgatgaagtcttcagcctgctggaagaggcgctgcgcccgctgcaggccgcccgccagcagcatgtggcggagcgggcggcatatacgcagagccgcatccagcaacagaaaaaccagcgcgacgcgcttctccatgccagccagagcggggccattaccaaaccctggctcagctactgcctcggccatctggctaatcaacaccgcggccggatcgtttctgaactgaccacgctgccgcagtttgccggactgacccatgccgagagctattaccaggaagcgctggccggcggcctgggcgaagccctgcccatcgcgctggggctgcagcttgcgcgccgggaagagctgattattgccgccgtcggcgacgggtcgtaccttttcgccaaccctgcggtctgccaccatattgcggaggtaatgaagcttcctgtcctcgtcgtggtcggaaataacggcggatggggcgccgtcgcgggcggcaccaaagcgctctacccggacggctacgcggcccgcgcggaaaccattccggccaccgcctttaccacctcgccggatttcgccgcgatcgccgcctccagccgcgcggcggccctgtcggtttcccgggccgaagatctccccggcgtgctggaagaagcggtatccctcatacgcacccgccgacaaagcgtgctggttgacgtgcagttagcccgctaacggtttatcctccgggcgcttgtcgtccggagggggttgtcaccccttctggtcacctttatccacatggcccagcggcttctccgggaagcagacatcgcgcacccggcgtttcagctcggccgcatccggaaaaccgccatcctgcttgcgctcccagatctgctgaccgtcgacatcgatcgtgaagatcccgccggtccccggcaccagcgtcaccgaggcgatgtcggtgctgaaggtatgtaacagctcctgcgccatccagctggcgcgcagcatccagttgcactgggaacagtaggtgatggtgatggccgcttttgagttcatcgtcgtctcgctaagtctgaaagggcaaattgtaaacaaagtgcagtttaaatgaagaacacatgattattttgttgcaaacgataatacctatcattaccattcgcaatcaacaaatggagtaagaccctatccgcaacggaaaagacggagcaacctgcaactctggaagtaacgcgtgagccgatactaataacgatcaaggcgtggcgactatgtacaaatcgactccgtcagcagcatggtgtaaaaaaggcctgctggtgacctctttgtttgcagcaatttatcagacttctgccatcgcagcagatacttccgccgttagcggcgaggcggtggatgacacttcggaacaaatgaccgtcaccgcccccgcgccggtgcagaaagccggtagcgaacacagcatcagcgcccgggagctggagaataaaggcgctaacgatttcagctcaatcatgcgctatgagccgctcattagcgccgccggggccagcggcggctccggcaacggcaaaagcggcttcgaccgcggaggttacaccggctacaacattcgcggtatggagagcaaccgcgtaggcatcgacgtggacggtatcgcgcaacccaacgccaccggccgcggctacgtcggccgcgccgggctcaacaccttcggcatcggccgcgattatatcgacccgtatatgtacggcagcgtggatatccagtccggcgccacctcgacggaaacggccaacagcgctatcggggggaatgtctccttccgcccgaaatcagcggatgattacctgcgcccgggcaagaccagcgccttcggctaccgcagcggttacgactctgcagatcgcagctggcacaacggggtgaccgtcgccggtggcgatgagttcctgcgcgggattttggtctatagccgccgtgacggccaggaaaccgaaaacaacagcggcaccgtcgacgcctacccggcgaactggcactccgatgcttttctggcctccgggatctggcagcctaacgatgagcacaagctgaccagcaccttcgactattaccataaaaccaaccacacccactacgatacctgggactccagcggcaacagcaccatcggcaccgccaaccagaccagccagacccggcgctggggcctgagcctgaaggatgactggacgccgatgaacgactacctcgacagcgtctccacaaaaatctactaccagcataccgaagcccatgactggacttatatgccggacagcgtcacccgcagaatgcagacggtgaactctaactacgataccgacacctggggcctgcagactgcgctggcgaaaaccctgggccgccacgatctaagcgccggtttcaacgccagcaccagcaaaacccagcggccgttcagccagtcgccgatccccagcgtttacagcgagatcatgcagccggaggcagacagccgcagctacaccctcggcggctttgtccaggataagatcaacttcgaccttgatagccacaacttcgccattattcccggcgtgcgcgtggtgcatcaatcgactaagccggaaaatctgtccgaccttgccgccaacagcagcgtactgagcgaatcgtcggtggcgaatctgtacggcaaaaacagcgatacccaggttctgccgtcgttgaccttccagtacgacctcaccccgcgcctgatgacctacctgcagtaccagcgcggggcgcagttccccaacgccagccagctgtatggctcctggaacctcggctccagctacgccggcagccagcagtatgccctgatcggcaataccgatctgaagacggaaaccagcgataatctcgagtgggggctgaaaggggaagttaccgaaggcatcaccctgcgcacggcgctgttctacaacagctataagaactttatcgcctatacccgctatacccgcgccaacaatccgggccagttcacgaatgtgccgtcgaacatctacaccatttatcaggcggaaaaccgcgataaagcctatatctacggcagtgagattagcactaaatttaactttggcacctggtttgagcaggtggacggcctgagcgccaccctcgccctcggctatagcgaagggaaatcgaaatccagctacagcggcgataaatacgtcgacctggacagcgtggcgccgatgaaagccatcgtcggcgtggcgtgggacgatccggcgaaacgctacggcaccgccctgacggcgacctttgtcaaagggaaacaggcgaccgccaccaaccgcgaaagctacagcaacagcggatccgccatcaccgatgccagcagcgactatatgcgcgtgccgggctacggcatgctggactggaccgcgtactggcaggtggcgaaaaacgtgcgcctcaatggcggggtctacaacctcaccgatcgtaaatactgggattacctgagcagccgcaatatcgagaccggcaccaaccaggacgccaacgataaagcgctggcggtgatgccgggccgcacctggcagctgggcgtcaacgtcgacttctgattgcccgaataataacgcacctgcccccggcccgccggccggggatattcatcgtcgagaaggatatgattatgccaaatgcacaccctgacctgtggcagcgctaccaggccaccaaagcggccagtaccgcgaaatatgcccgcgatatcgccgcggaaatggggatcagcgaagccgagctgaccgccgcccgcctcggccatgatgccgtgcgcctgagcgatgacgcccgggcgctgattgccgccctggagcgcgtcggcgaaaccaaatgcatctgccgcaacgagtatgccgtgcatgagcaggtgggccagttcacgcaccagcacctcagcggccacgccgggctggtgctgaacccgcgtgcgctcgacctgcgtctgttcctcagccagtgggccagcgccttccatctgaacgataatggccgtcagagcatccagtttttcgaccaccacggcgacgccctgctgaaagtctatgcgaccacccagaccgacatggcggcctgggacaccctgatcgcggaatatcgggtggcggcgccggcaccgctgaccctgcgcccgctggagccggtgaaatatgccgataccgccgacggcgccgccctggagaacgactggcgcgcgatgaccgacgttcaccagttcttcggtctgctgcgtaaatatcagctttcccgccagcaggccttccgtctggtgagcgacgacctcgcctgccgcgtggatcgccatgcgctgccgtcgctgctggagacggtgcgccaggagggtaatgaaatcatgattttcgtcggcaatcgcggctgcgtgcagatctttaccggcgccctggaaaagctggcccccatgcgcggctggctgaatatcttcaatactacttttaccctgcatctgcgcgaagagagcgtcgatgaagtgtgggtgacccgcaagccgacttcggacggacacgtcaccagcgtcgaactgttcgctaaagacggcacccaaattgcccagctctacggccagcgcagcgaggggcaccccgagcagacgcaatggcgccagcaggtagaccgcctgacccgtgaagggcagcccgcatgatgcgctggttactgctcttcatcgctttcccgctgctgagtcacgccgccgttgagcggctcgtcaccctcggcggagatgtcactgagatcgtttatgcccttcacgcggaggagagcctggtggcgcgggacagcaccagcagctggcccccggcggcgcaaaagttgccggacgtcggctacctgcgacagctgaacgccgaggggatcctcgcgttacgcccgcagctggtgttagcgagcgcccaggcgcagccctcgctggtcttacacaaagtgcaggcgagcggggtgaaggtggttaacgtgccgggcggcgaaagtctgtccgcgatcgataacaaagtggctgtcattgccgaagcgttaggcaaaacggcggcaggcgacgcgctgcgccagcagcttcagcagcagatcgccgccattcccacgcagccggttgctaagcgggtgctgtttattctcagccacggcggaatgaataccctggtggccggacagcataccgcggccgatggcgccattcgcgccgccggattgcagaacgcgatgcagggcttcgaccactatcgcgccatgtcgcaggaaggggtcgccgccagccaggcggatctggtggtgatctccgccgatggtctcaaagggatgggcggcgaagccgggctgtggaaactgcccggcctggcgcagaccccggcggggcgtcataaacagctgctgacgatcgacgatatggccctgctgggcttcgggccgcgcacaccgcaggcgataatcgcgctgcgaaacaaagcggagcagttgccctgatgcgccctgccctcgctcgccgtttgctgctgatgacgctgctgctggtctccctgacgttgtttgccaccaccctcggcgccatgcgcttgccgctggtcaacctgctgccttccggggatgacatgctgcgccatatctggctgaccatccgtctgccgcgggtgctgctggccctgctggtgggcgcggcgctggccctctccggctgcgtgatgcaggggctgtttcgcaacccgcttgccgacccgggcctgctgggcatcagcagcggcgccgcgctggcggtggccagctggctggtgctcccgttctccgctgcggggctgatcgctctgtatatgccgatgctggcggcgtttattggcagcctggcggtgatggtggtgattttcatcctcagtcgggcggaggagggttcgctgtcgcgcctgctgctggtggggatcgccatcaacgcgctgtgcggcgcgctggtcggcgtcctgtcctggctgagcaatgacgcccagctgcgccagctgtcgctgtggggaatgggcagtctgggccaggccgaatggccgacgctgctggtggccgcgaccttgattatccctgcggcgctggcggtgtggtggatggcgtcccgcctcaatctgctgcagcttggcgatgaagaggcgcactatcttggggtcaacgtgcaggcgctgcagcgctggctgctgctgtgcagcgcggtgctggtggccgtcgcggtggccatcagcggagtcatcggctttatcggcctggtggtgccgcacctgatgcgcctgtggctgggaccggaccatcgcggactgatccccggctcgctgctggccggcgcgatcctgcttctgctggccgacaccctggcccgcaccgtggcggcgccggcggagataccggtcggtctgctcaccagcctgctgggcgccccctggtttctgtggctggtctttcgtcgggagaactccagacatggttaatgaatactgcgcccaggggctgtcacttcaccttggtaaacgacagattatcgacaacgtctccgtcgcgctgcgcggcggcgagatgacggcgcttatcgggccgaacggcgccgggaaatccactctgctgcgcctgttgaccggctatctgactccggacagcggcacccgccatcttgcaggcaagccgttggaggcctggtcccccgaggcgctgtcgcgccggcgggcggtcatgctgcagcgaacagccctgcaggccgactggacggtggaaacggtcattgccatgggacgctcaccgtggggcgcgacggcggatccggcggtgctggcggcggtgatggccgtcaccggctgcgatggccttgccggtcgccgctatcccggcctctccggcggcgagcagcagcgggtacagctggcccgctgtctggcgcagctatggcgcgacggcgcgccgcagggctggctgtttctcgatgagcccacctcggcgctggacctttactatcagcagcacctgctgcgtttgctcaaacggctcaccgccggcgggcaactgcacgtctgcgtggtgctgcatgaccttaacctcgccgccctgtgggccgaccgcatcctgctgctccaccagggacatctggtcgcccagggcacgccgcaggaggtgatccagcagccggttatccatcgctggtacggggcggatgtccgcctcgtccagcacccggacaacgcggtcccccaggtttgtctggcgccataatccccgcgcggcgcaactggaatccggatcgcgccgcgcttacgctttctggcaataattgcctgcattatattattgagggtcatttatatttaaaatctataccaatggcgtaataacccaatgaaatatttacgacagctatttttaaatataaaccatcattacagagaagatatttcccgtattaatccaaaaacgacacattgattatttactgcgcttaatcaactcgatacactgttttcttactaatgataatagagggaagaagaagcatggctattccaggtaatatgtggatatacgacgacggtggggcactaatcaaaggtggttgtgatgttgcagacagggagttcagcatcgaatttaaagggtttcatcacaatctctccattcccactgatcatgccactggcaagcctaccggcactcgtcagcactcaccaatgatcatcgttaaagaattcgactattccagtccatacctctacaaagcagtagctactggtcagaacctgaaatctgctgaaatcaaatggtataaaatcagcgatgctggtcaagaagtggaatacttcaatatgctacttgaaggcgtccgaatcgtatcaatatctcctacaatggcttccccagaagacaagaacaacaaccatcttgaatctgtcgaacttagatatgagaagatcacctggaaacattgtgacggaaatataattttcaccgatgcctggaatgaaagacaaacagcataatagatgagcaaatggatacgacagaagaactaaatggaacctatttctatcacggacaatccaatctttcggctggtgaactttttgatgtcatttttcttgaacaattttgtgacgaacttggcattggtattgaatctggtgccgctatcctcgccgggcaaccttggctaaaaaccagaacaaagccaggagaggcaataaaaggaacaagtgttgtttctaaatatggaaggatgcttctgagaaatgcaaaaactccatttggtattagggttcctacacccgttggtgtaagaatgagaaaaacgaatagtcttgctgctgttatcgcccgttatgttccgtggttaggttggataggacttgtaaactcaatttatcaagtttcaagaaaaactcaggaaaaatacaacctaatagctcgccccaaagaccgtatacaatggacatccttttaatgaaaagcattcaagatcaggttttagacttgtttaaagatgagatctcaacccgtttagataaaaattggaaagaaatcccattggaacttgattatgacttatttgatgctcccggcgacgatctgcatgacgctttaaataaatttgaacaaaaatttaatgttgatctttccagtgttaaatggtcgtgttatttcccttgggagaatactccaatgctaactcggtggtttaaagtaaaacgagaagatgtagaaaaaacgcgtaaacctttaactatcaaaatgtttgccgaatcagcaaaagcaggtaaatggctttacgactagcaaccacaagccgttgtcgtaacgaggtctacggccagaaggcagaacaacatcgacggcgaacgtaatgtatgaagacgatcgcgtggcggcggttcaattactgtgacggtaccccgccccctctgcaactggaatccggatcgcgccgcgtgctttcgtcggtttccctcacctgcccatctccgttattatgtctcatccatgtgataacgacgacaactacaaaatcgcagccatttcaaatcagggatctggataacaccccatgagcacaattgacaatctcgacgcccacacgccgatgatgcagcagtatctcaagctaaaggcgcaacatcctgacattctgctgttttaccggatgggggatttttacgagctattttatgacgatgcgaaacgcgcctcgcagctgctcgatatctcgctgaccaagcgcggcgcctccgcgggcgaaccgatacccatggccggcatcccccaccacgccgtagagaactacctcgccaaactggtcaatcagggcgagtcggtggccatttgcgagcagattggcgacccggccaccaccaaggggccggtcgagcgtaaagtggtgcgtatcgtcaccccgggcaccattagcgatgaagcgctgctgcaggagcgccaggacaacctgctggccgccatctggcaggacagcaaaggcttcggctacgcgacgctggatatcagctccgggcgctttcgtctgagcgaaccggccgaccgcgaaaccatggcggcagagctgcaacgcaccaacccggcggaactgctgtatgcggaagattttgccgaatcgtcgctgatcgagggccgccgcggtctgcgccgtcgcccgctgtgggaatttgaaatcgacaccgcgcgccagcagctaaacctgcagttcggcacccgcgatctggtcggcttcggcgtcgaaaacgccccgcgcggcctgtgcgccgccggctgcctgctgcagtatgtcaaagacacccagcgtacctcgctgccgcacatccgctccatcaccatggaacgccagcaggacagcatcattatggatgccgccacccgccgtaacctcgagatcacccagaatctggccggcggcaccgacaacaccctggcctcggtactcgactgtacggtgacgccgatgggtagccggatgctcaagcgctggctgcatatgccggtccgcgataccgccgtgctggtggagcgccagcagaccatcggcgcgctgcaggagcgctataccgagctgcagccggtgctgcgccaggtcggcgatctggagcgtattctggcgcgtctggcgctgcgtaccgcgcggccgcgcgatcttgcccgcatgcgtcatgccctgcagcaactgcctctgctgcgtgagctgctggccgacgttgacagtcagccggtgcaaaaattgcgcgagaaaatgggcgagttcaccgaactgcgcgaactgctggagcgtgcggtgatcgacgccccgccggtgttggtccgcgacggcggggtcatcgccccgggctatagcgaagagctggacgagtggcgggcgctggccgatggcgccaccgattatctcgataagctggagatccgcgagcgcgagcggctgggcctcgataccctgaaagtcggctacaacgccgtccacggctactacatccagatcagccgcggccagagccacctcgcgccgatccactacgtgcgccgccagacgctgaaaaacgccgaacgctatattattcctgagctgaaggaatacgaagataaggtgctgacctccaagggcaaagcgctggcgctggaaaaacagctttatgacgaactgttcgacctgctgctgccgcatctcgccgatctgcaaaccagcgccagcgcgctggccgagctggacgtgctggtcaacctggcggaacgcgcggaaaccctgaactactgctgcccgacctttagcgataagccaggcattcgcattagcgaaggccgccatccggtggtcgagcaggtgctgaaagagccgtttatcgctaacccgctgcagctggcgccgcagcggcggatgctgatcattaccgggccgaacatgggcggtaaaagtacctatatgcgccagaccgcgctaattgcgctactggcctatatcggcagctacgtcccggcgcagaaggtggagatcgggcccatcgatcgcatcttcacccgcgtcggcgcggcggatgacctggccagcggccgctcgacctttatggtggagatgactgaaaccgccaatatcctgcacaatgccaccgagcatagcctggtgctgatggatgagattggccgcggcacgtccacctacgacgggctatcgctggcgtgggcctgtgcggaaaatctggccaacaaaatcaaggcgctgacgctgttcgccacccactacttcgagctcacccagctgccggagaaaatggaaggcgtcgccaacgtccacctcgacgcgctggagcacggcgataccatcgcctttatgcacagcgtgcaggacggcgcggccagcaagagctatggcctggcggtcgccgcgctggcgggggtgccgaaagaggtgatcaagcgcgcgcggcagaaactgcgcgagctggagagtatctcgcccaacgcggcggcgacccaggtcgacggcacgcagatgtcgctactcgccgccccggaagagacctcgcctgcggttgaggcgctggagaatcttgatccggactccctgaccccgcgtcaggcgctggagtggatctaccgtctgaaaagcctggtctagccacccattaaggtgaaaaacggcagcgctgtgaagcgctgccgttttagtaaacaaaaaaatgggtgctagaggatgcgtcctgacaacccatacgcggggttgcccccgcgcggatgctacttcttcgattcgtaagcgagaacagctttaaactcaatattacgctctttaatactcagctcgcatagtgagctgtgcaccaacagcgtaaatcccagtaccgtaatacagagtacgatgattgccacaagggcatattttgtcagcatatcttgcctccctgcaaagaagagactaacatctgaattgtctatgttcattcgctagcctcagttgatagaaatatctcctggggctttcgtctgtctggggtcctggtaatgctcaaggccagacagcctcaagcacccgccgcaattctacactcgtcagggcgtgaaatttatctgcaaggaattaatcagacgaattttataataatctggatgcaggctcgcaaagtcatcccggtatattaacccttcacgtaattttttaatttaatgaaaaaataatttccataattgtactaaatataaaaaaggcccgacttagcgggcccctttcattaacgcttatcttccggcaatagcggcggtacgtgcggcacctgcggcgcctcatcgatatctttctgcgtcatgcggaacgcttccggatagtgttcgcggctggtgcggcgcagcggctcggtatctcgccaggtgtaaagacagtgctggcactgatacacggtccagacccctttcaccggcgaggtcgccatgacttcaatcttttcatcggcgcaacgtggacaaatcatcttcttctccttatttacggttggccagcatagcggtcagtttttcagcccaggctttggtttccggcagatcctgcaccggctggctgtagtgaccgcgaaggtccggcgcaaccggggtggtggcgtcgataatcagtttgtcggtaatgcctgccgggctggagcctgggtcaagttcaaggaccgacatgttcggcaactgcaccaggtctcccgccgggttaaccttcgaggagagcgcccacatcacctgcggcaggttgaacgggtcgacgtcttcatcaaccatgatcaccatcttcacatagccgaggccgtggggagtggtcatcgcccgcaggcccaccgcgcgggcaaaaccgccgtagcgttttttggtggagatgatcgccagcagaccatgggtgtacatggcgttgaccgcctgcacctccggaaattcggccttcagctgctgatacagcggtacgcaggtcgccgggcccatcagatagtcaatctcggtccacggcataccgaggtagagcgattcaaaaatcggtttgctgcgataagagactttgtcgatacgcactaccgtcatgttacgaccgccggagtagtgaccggtaaattcaccgaacggcccctcgatctcacgcttacgcccttcaatgaccccttcgaggatcacttccgaaccccagggcacgtcaaaaccggtcagcggcgcggtagcgatgggatacgggctctcgcgcagcgcgccagccatctcatattcagactgatcgtatttcagcggcgtggcgcccatcagggtaataatcgggtcgttaccgagggtaatggcgatcggcagatcttccccacgctcttccgctttgtgcagatgcagcgcgatatcgtgcatcggtaccggctgcaggccgagcttgcgcttgcctttcacttccatgcggtagataccgacgttttgcttaccgaagttatctttatccagcggatcgcgcgaaacgacacaggctttatcgaggtagaaaccgccgtcaccatcgttgaggcggaacagcggcagaatatcgaacaggttgatatcatcgccatcaacagtattttctgcccacgccgggttggcgcggcgctctggcgtcaccgggaagttatcccagcggcgaatgaactcatcaatctgctttttcaccggcgtgttaggcggcaggcccagcgagatggcatggttctgccacgagccgatggtgttcatcgtcacgcgagcgtcgttaaagccgcgaatattatcgaaccacagcgccggggcaccgtcgccgatgcgtccggtcgcattggcggccgccgccagatcgggctcagcgttcacctcttcactgattttcagcagttgtccctggtcatccagcgcctgcaaaaagctgcgcaaatcatcaaaagccattattcgatctcctgtgcaaattgttctgccgtgcgcaagccgttccagcggcgcgctttgtgatagtcgaggccaaactgatccagcacccgggtgacgatatgattggtgatatcgtcaaccgtctccgggtggttgtagtaagctggcatcggcgggaccatcgccacgcccatgcgggacagcgccagcatgttctccagatggatcgtgctgagcggcatttcccgcgggaccaacaccagcttgcgcccctctttgagcaccacgtccgccgcgcggcccaccagcccttcggcataacccgcgcgaatgcctgcaagcgttttcatactgcagggaataacgatcatgccgtcggtacgaaatgaaccggatgagatggtggcggcctggtctgccgggctgtgggaaaagtccgccagcgcggccacttcgcgcgccgtccagggcgtttccagctcgatggtggttttggcccatttcgacatcaccagatgggtttccacctccggcatatcgcgcagcgcctgcagcaatgccaccccaagcggtgccccggtggcccccgtcatcccaataatcagtttcattccagacctcattacttttgttcgtgtacgaactttatatttaaactaccccctccagctcttattggcaagatcgttcgtatacgtgcgcatttttaatcaaaacgcagaaagggtataaaaaggcgtacgaacggctatcatagaggtgacagttttgttacggagtattcatggagttacgaaacgaagcattccacctgctgcgccagctttttcaacagcataccgcccgctggcagcaggcgttgccggacctgactaaacctcagtatgcggtgatgcgctcggtagcggagcaccccgggatcgaacaggtggcgctgattgaagcggcggtcagcaccaaggctacgctggcggagatgctcagccgaatggaagcgcgcggcctggtgcgccgggagcacgatccggccgataaacgccgccgttttgtctatctgaccgacgaaggcgaggcgttgcttaaccgttccattccgcagggcaatgaggtcgatgacgagtttctcggccgtctgagcgatgacgagcgcgagcagttctcccggctggtgcacaaaatgatggcgccctgaacgggcgcttagccgaccttctcgcgcaggaagtcaataaatgcccgcacccgggtcggcaaatgctgcgagtcgggataaagggcatacacgccctgctgtgggaaatggtattccggcaggagcggcaccagctcccgctgcgccacctttttggctaccagccatgcgggcagcaaggcgacgccgcatcccgccagagcaaagctcatcagcgccgtagcgctatcagcagaaaaccgcggcgcgctggctatcgcgaaatccacctctgtctggtgatccgtgcgcagctgccagcgcagcggcgtcggcaggcgctcgtgaataatccactcagcttgcgccagatcggacagcgtctgcaccggatggcttgccagccaggccggagaggcgacgggcaggatcgcgaaactggctatccgcgtcgcccgatagcgggaatcggccagcgtaccgaggcgtatcgccacatcaaatcgttctgaaatgaggtcggcatgatgggaggaggagacgtggcgcacccgcagcgccggatgacgacgggcgaacgcggccagcgctggaatgataacctgcgcgccatactccggcgtggtggtgatccgtagctccccgcttaagccgctatggctggcccgcacctcatcctggagattttccgccgcgttcaggagcgccaccccgcgctgatagaacagcaccccggcgtcagtgagccgcaaacgccgcgtcgaacgcagcagcagcgtcacccccagctcattttccagctgccgtacgttaaagctgaccaccgccttggtctgccccagcgccgctgcggccagggtgaaactgccggcatctaccacggcgataaacatggtcacgcgctgaagattaagcatcgtcgtccggatgattgtcaaaaatattcagacagtatatcccgattagtcccgtttatccctcactgcggcaggtttacagtagccgcctgtctgagggagtgaaccatgacctaccgccaccgcgttgccaccgtttttctgttcggtttttttctcgatttgatcaatatgtttatcgccagcatcgcctttccggcaatcagccgcgcgctggcggtttccgtctcgcaactggcgtgggtcagtaatgcctatattctcggtctgacggtcgttgtgccgttcagcgcctggctcagcgagcgctggggggcgaaacggctgtttttactctcgctggggctgttcagcctcggcgcgctggcggcagggcttgccaacagcctgagcgaactgattttatggcggacgctgcaggggatgggcggcgggctgttaatccccctcggccaggcgctgacgtggccgctgtttcagccgcatgagcgcgcgaagctgtcggcggcggtgatgctggtcggcctgctggcccccgcctgctcgccggcgatcggcggcctgttagtcgaggcgttcagttggcgctgggtcttttacgccagcctgcctgtcgctctgctaacctttgtgctggcggtgcgatggctgaacgacacccacggtccggttcgcccgactcgctttcttccactgtcgctgctggccgatcccctgctgcgcttcgcgatgctgatttacctctgcgtgccggggatgtttattggcgtcaacgtggtggggatgtactacctgcaacgcgtcaccgggatggcgccgggggcaatcggtgccctgatggtgccctggtcgctggcctcgtttgccgccatcacctttaccggcagatatttcaaccgcttcgggccccggccgctggttgtcatcggctgcctgcttcaggcgatggggatcatgctgctgctgaagatcgatgcggacagcccgctggcgctgttgattctggcctttacgctgatgggcggcggaggcagcttatgcagcagcaccgcgcaaagcagcgctttcctgcatacgcctgccgaagagatgcctgacgccagcgcgctatggaatcttaaccgccagctcagcttctttgccggcagcgccctgctcgccctgctgctgagggtgttcccgccggcctacgcctggcagggggtatttattagcgccgccgtcattaccctgttgccgctgctgttttgcctgcggctgaataatcgggcgattatccatcgcctgcacaccactctggagaagtcatgaatccttatctgcaggaagtccttgatgcccatgtccttatcgaacgctggttaagccatggcgaaggaagcgctgaggcgctgatgaagcgttttgccgccgattttaccatgatccccttgagcggtgagaagatggactacccaacggtgagccgttttttccaccacgccggcggcagccgtccggggttagatatcgtagtggatcagatggaaatcatcagcgagtggcacgacggcgccgcagtgctatatcgtgaaagccaaacgctggcggatagcagtcagaacgttcgctggtcgacggcgatttttcagcaagcggaagggaaaattgtctggcgccatctgcaggaaacccgcctcggctagcccaaagaaaaaggccccgactttcgagggggcctttttgacagaaaacgtcttattcgcggaagagcgcttcgatattcagcccctgtccctgcagaatttcccgcaggcgacgcagaccttccacctggatctgccgcacgcgttcgcgggtcaggccaatttcacggcccacatcctccagcgtggcagcttcataacccagcagaccaaaacgacgtgccagaacttcacgctgcttggcgttcagttcgaacagccatttgacgatactttgcttcatatcatcgtcctgcgtggtgtcttccgggccgttctctttctcatcggccagaatatccagcagcgctttttctgaatcgccacccagcggagtatccacggaggtgatgcgctcgttcagacgcagcatacggctgacgtcatcgaccggtttgtccagctgttcggcgatctcttccgcgctaggctcgtggtccagcttatgggacaactcgcgcgcggtacgcagatagacgttcagctctttaacaatatggatcggcaaacggatcgtacgggtttggttcatgatcgcccgttcaatagtctggcggatccaccaggtcgcgtaggtcgaaaaacggaacccacgttccgggtcaaacttctcaacggcgcggatcaggccgaggttaccttcttcaatcagatccagcagcgccagaccacgattgctgtaacgacgggcaatcttcaccaccagacgcaagttactttcaatcatgcgacggcgtgaagcgacatcaccacgcagtgcgcgacgcgcgaaatagacttcctcttccgcggtcagcagtggggaataaccaatctctccaagataaagctgagtggcgtcaagtacgcgctgggttgcgccttgcgacagcagctcttcctcagccagatcgctatcactgggttcctcttctactaaggctttctcgtcgaaaacctcaattccgttctcatcaaattccgcgtcttcatttaaatcatgaactttcagcgtattctgactcataaaggtggctcctacccgtgatccctgagcaaagcaccttccacggcacatcaacaaacgacgcctggacgatttcccctgccctctctgcgagaggaacgtagacaccgccctggcgcctgttagctgatgcttcgcttatccgtactttgccaaattatcgctgcggtaagtactgcagcgggttgacggatttccccttgtaacgaatttcaaaatgtaatcttgttgagctggttccggtgctacccatggtagcgattttctgccccgctttgacttcctgttgctcccgaaccagcatggtatcgttatgagcgtaggcactcaggtaatcatcgttgtgtttgatgataataagattaccgtagccgcgcagtgcgttaccggcatagacgacgcgcccatcggcggtcgcgacaatagcctgtcccttactgcctgcaatatcgatacctttattgccgccttccgcgccgctaaagttctcgataaccttgccatcagtcggccagcgccatgttgagatcggcgaactggttgacgtactgcttgcagtcggctgggttgtgctcaccgttgttggtgccgtcaccggcgcgacaaccgttgtggttgtagtcgctggtttattattaggcaacatcttggtagcactctgttcacctgaagattcagaatacgtaatagtcggttgtgaagcaaccaccgcggtcgatttttgtgcagaagttgtgctggtcgtcgcaccgccgctcgctcttgcgctggcctgagaaacggcgttttcgccggtgatcggctggcctgaggcgttaccgacctgcagtacctgccccacgttcagcgcgtacggggccgggatgttgttgcgttgcgccaggtcgcggaaatcgttgccggtgacccaggcgatatagaatagcgtgtcgccgcgttttaccgtataggtactgccgccggtatagctacctttcggaatatcgccatatttgcggttgtaaacgatccggccatttaccgtctgtaccggctcctgcgccaccggcgccggctgcggctgaatggtctgggtctgcatcggctgaatcggctgcgcctgaggagcggacttgacgccggagggtggcggcgtaatcagcatgccggagttggtgctggaagaggcggcgccgccggcagagctaaccggcgcaggcggattattggtgttggtacacccggccagccagagtgaaaccagtgaaagagccgcaatacggctgacggtaaatttggtgcttcccgcgctcatttatcccccaggaatatgttaactgccaatatcttgcttaccgggcggcgcccggccaggacactgaaaaatgtgtccaccctacgcctaaagtcaggcaaaaaaaacctggaataatccgggtctcaggccagctcccccttcaccaggggaacaaagcgaacggcctcgacggtatcaatgataaattcgttgccccgacgacggatccgtttgagaaactgatgctcttcgccgaccggcagcaccagcacgccgtcatcatccagctgcgccagcagcgcggtcggtatttccggcggcgccgccgtcacaataatggcatcaaacggcgcccgcgcctgccaaccttgccacccatcgccatgacgggttgaaacattatgtaaatcaagttgtttcaggcgacgacgcgcctgccactgtaaactcttaattcgctctaccgagcatacgtgatgcaccagatgcgccaggatggccgtctggtagccggaaccggtgccgatctccagcacccgcgactccggcgtcagcgtcagcagctcggtcatccgcgccaccatatacggctgggagatggtctgcccctggccaatcggcagcgcggtgttttcccacgctttatgttcaaaggcttcatcaacaaacttttcgcgcgggaccagcgcgatcgcctcgaggacacgttcatcgacgatgccctgcgtgcgcagttgattcaacaaactttcaacacgtttacttaccattgcctgtcaaccccgacacgttccagccaatcggtgaccacctcatgcgcctgatgggcggttaaatcgacgtgcaatggcgtcacggaaacatagccttcatccactgccgcaaaatcggtgcccggcccggcatcgcgcttatcgcccggcggaccaatccagtacaggatgttgccgcgcggatctttttgcgggatcacctggtcggccggatggcggttgccgcagcgggtcacgcgaatgcccttgatttgatcaagcgggagatccggtacgttgatgttaaggatccgcccggtacgcagcggctcgcggcttaaggcgcgcagaatggtgcaggttaccgccgcggcggtatcgtaatgctgatagccgttcagcgacacggccagcgcggggaaccccagatgacggccttccatcgccgcggccacggtgccggaatagatgacgtcgtcgcccaggttggggccggcattaatgccggaaaccacgatgtccggacgcgggcgcatcagcgcgttcacgccgagatagacacagtcggtcggggtgcccatctggacggcgatgtcgccattttcaaaggtaaacgtacgcagggacgattccagcgtcagcgaatttgaggccccgctgcggttacgatcgggtgcaaccacctggacctcggcaaactcccttaaggccttcgccagggtctgtatccccggcgcatggatcccgtcatcgttactcagcaatattcgcatagtcacccgttgtattgataagctccctgaccacgctggtggcgaagctgcccgccggcagccagaaacgcagttcaacggttacgtcatcccaccagttccagctgagctgctgtggatagagaagcatcgcccggcgcgccgcctcgactttctcccgtaccagcagcgcctgcaacgcggtttcctcggcgatcgcggcctgctcgaaagccagggcgtcgcgctggcttccccagtcgccgctgcccggcagcgtggccgtaatcatcagttcgcggttatgcacccgcgcctgcgaaacctcgagttcttccggtgtgacgacaaaccagctcccgcgccccgctaattgtagcgcatcgccatcaacgacctgattaaattccgttttttttaatctaatactcacttgctgattaaacaacgcgctgcgggctgccgacaaccaaaaactgcgcttattgcgatcgcgcactggcgcgccgctctccgcccagcgcagggcgccctgcaggttactgccgccaatgccgaagcgctgcgcgccgaaatagttcggcaccccccgttcagcgatggcctgcagacgcgtctccacgtcctggcgatcgctaatctcgcgcaggatcacggtaaactggttgcctttcagcgcgcctaaacgcagcttacgcttatggcgagcatattccagtacctggcagccctcgagctgaaatttgctcaggtccggcatctctttgccgggcacccgggcgcacagccactgctcggtgaccgcgtgcttatccttttgcccggcgaagctcacttcacgggcgtggatcttaaggaattttgccagcgcgtcggcgacaaagcgcgtattgcagccgtttttcaggatccgcaccagcacgtgttcgccttcgccgtccggggcaaagcccagatcttccaccaccagaaaatcttccggattggctttcagcagcccactgctctgcggcttgccgtgcagccaggtcagttggtcaaaggcgatcatttgtcggccttacgcagcagcgcaaccgcttcgcaggcgatcccttccccgcggccggtgaagccgagcttctcggtggtggtcgctttcacgttgacgtcgtccatatggcagccgagatcctcagcgataaagacgcgcatctgcggaatatgcggcagcattttcggcgcctgggcaataatcgtgacgtcgacgttgccgagcgtatagcccttggcctgaatgcggcgccatgcttcgcgtagcagttcgcggctatcggcgcctttaaacgccggatcggtatcggggaacagcttgccgatatcgcccagcgccgcggcgccaagcagcgcgtcggtcagcgcatgcagcgcgacgtcgccgtcggagtgggccagcagccctttttcataaggaatgcgtaccccgccaatgatgattgggccttcaccgccaaaagcgtgtacgtcaaaaccatgtccaattcgcattaagctttctcctggtgtcgggaacgggtgaggtaaaattcagccagcgccaggtcttccgggcgcgtcactttaatattatccgcgcgtccggcgaccagctgcggatggaagccgcagtactcaagcgccgaggcttcatcggtgatagtggctccctcgtttagcgcgcgagtgaggcaatccaccagcagctcgcgagggaaaaattgcggggtgagcgcatgccacaggtcattgcggtcgacggtatgggcgatagcggttttgcccggctcggcgcgcttcatggtgtcgcgcactggcgccgcaaggatcccgccgacgcggctggtttcgcagagcgacagcaggcggctgaggtcgtcctgatgcaggcaggggcgcgcggcgtcatgcaccagcacccactgcgcctccggcaacgcctgcaggccggcgagtaccgaatcggcgcgctcagcgccgccatccaccacggtaatctgcggatgctgcgccagcggcagctggctgaagcggcgatcgccggggctgacggcaatcaccacccgctggacgcgcgcatccgccagcagcgcggcgaccgcgtgttcgagaatcgttttgttaccgattgagagatattgtttcgggcattccgtttgcatgcggcggccgaaaccggctgccggcaccacggcgcaaacgcccggaaaagtggctgccatgttgtaatcctgggcctggttatcgattgttctgctgttgccccgatgcctgattgcgtttagacgcatccggtaccagacgatagaaggtttcgcccgggcgggtcatgctgagttcattgcgcgcacgctcctcaatcgcttcctgcccgccgttgaggtcgtcaatttcggcaaacagctgatcgttgcgtgcttttaatttggcgttagtcgcctgctgggcggtgacgtcgtcgttaacccgcgtgtagtcgtgcaggccgtttttaccgaaccacagcgaatactgtagccagaccagcaaagctaataatagcagcgttagtttacccatcctgccccctgaaaaacggcatcatcatcccaaaactcgcccgggtacgctaccggggcgcgcggacgatgccgcgtaacgcggggactgtaccatatttttgctgtcgatacccatgcttgattcataccagcaacgggttatcccaacagccagaggaagagtagcgcaaacatcagcccaacggtcaggatggtcgcgctgacgctatagagcagtttgccattgagcagagagtgcagcgcaataccgaccaccaccgccaccggcatcaacgcaaggaagaatggccaggtgtagaggagaaagaagagtgtattactgccatagagaaggaagggaatacccagcgccagcagccacgaaataaagcccacggcagcgcccgacaaagaccaggtggtctcgtcgccgatcgccggaggcggttctgaacgaataatactgaggttctgggtattgcgcatatcgaatcctgtagaccgggcaaccggcacccctcgatgccgctgccgtttcaggatctgataatatcgctctgttgcagcaggtctaatagttggtgcaccaaatttgttaccaattgttcaccatccagatgaatttccgccttttccggtgcctcatagaccgagtctatgccggtgaaattgcgtaattcccctgcccgcgctttcttatacaatcctttcggatcccgcgcctcgcagatggccagcggggtatcgacgaacacttcgataaagcgtccttccccgaggcgctcgcgcaccatctgccgttccgcacggtgcggagatataaatgccgtcaataccaccagcccggcatcgaccatcagcctggccacttcgccgacgcggcgaatgttctctttgcgatcctcatcgctgaatcccaggtcgctgcacaggccatggcgcacgttatcgccgtccagcagataggtgctgacgccgcgctcatgcagggcctcctccagcgccccggcgacggtggatttacccgaccccgaaaggccggtaaaccacagcaccacgccgcgatggccgtgatgctgttcccgctgctgttgggtcacagggtgggcatgccagacgacgttttcgtcatgctgggccattatttgcctcccagcaggtcgcgggcgtcccagtgcgggaaatgtttacggatcagctggttcagctccagctcgaaggcgctgtactgtgatgccgaagtcgatgcctgcaggtgcggctcgttgaccatcccggcgccgacggtgacgttggtcaggcgatcgataaagataagcccgccggtcaccgggttttgctgatacggatccagcactaaaggttcgtcaaaggtcagctccaccaggccgatgccgttcagcggcagagactcgacttcacgctgggtcaggttgttaatatcgacctggtagcggatagcgtcgacgcgagcgcgggtcttcttgccggcgattttgatgtcgtagctctggcccggggtcagcggctgttcggccatccacaccacgtcgatgctggcgctttgtaccgccggcagcgaggcttgcgcgtcaaccagcaggtcgccgcgactgatgtcgatttcatctttcagcacaagggtaatggcttcgccggcggcggcttcctgcaggtcgccgtcgaaggtgacgatacgcgccacgctcgattcgacgcccgacggcagcaccttcagacgctggccaacctgcacggtaccggaggcgaccgtgccggagaagccgcggaaatcaaggttcggacggttaacatactgcaccgggaagcgcagcggctggctctcgaccacccgctggatctctacggtttcgaggacttccagcagcgtcgggccactgtaccacggcatattcgcgctctggctggcgacattatcgccttccagcgccgacaacggcacaaagcggatatcaaggttgcccggcagctgctcggcaaaggtcagataatcttcccggatctcgttgaagcgcgcttcgctaaactcgacgagatccattttgttgaccgccactaccaggtgtttaatgcccagcagcgtcgagatgaagctgtgacggcgggtctggtcgagcacccccttgcgcgcatcgatcagcaggatcgccaggtcgcaggtggacgccccagtggccatattgcgcgtgtactgctcgtgccccggggtgtcggcgatgataaatttgcgcttttcggtcgagaagtagcgataggccacgtcgatagtgatgccctgctcgcgctcagcctgcaggccgtccaccagcagcgccaggtccagtttttcgccctgggtgccgtgacgcttgctgtcgttgtgcagcgaagagagctggtcttcatagatctggcgcgtatcgtgcagcaggcggccaattaaggtgcttttgccgtcatcgacgctgccgcaggtcaaaaaacgcagcaggctcttgtgctgttgcgcgtgcaggtaagcttctacgccgccttcgttggcaatttgttgggcaattgtggtgttcatggcggctccttagaaatacccctgacgtttcttcagctccatcgagccggcctggtcgcggtcaatgacgcgcccctgacgttcgctggtggtcgataccagcatctcttcaataatttcgggtagcgtctgcgcttcagactccaccgcgccggtcagcggccagcagccgagggtacggaaacgcaccatccgtttttcaatcacctcgcccggctgcagatcgatacggtcgtcatcgatcatcatcagcataccgtcgcgctccagcaccgggcgctcagcggccagatacagcggcacgatttcaatattttccagatagatgtactgccagatatccagctcggtccagttggagagcgggaagacgcggatgctttcgcctttgttaatctggccgttgtagttgtgccacagctccggacgctgatttttcgggtcccagcggtggaagcggtcgcggaaggagtagatgcgctctttcgcgcgggatttctcttcgtcgcgacgcgcgccgccgaacgcggcgtcaaagccgtatttgttcagcgcctgcttcagcccttcggttttcatgatatcggtatgcttggcgctgccgtggacaaacgggttgatgcccatcgccaccccttccgggtttttatgcaccagcaattcacagccgtaggctttagcggtccggtcgcggaactcatacatctcacggaatttccagccggtatcgacgtgcagcagcgggaacggcagggttcccggataaaacgctttgcgcgccagatgcagcattacgctggaatctttcccgatggagtacatcattaccgggttagaaaattcggcggccacctcacgaataatatggatgctttccgcctccagttgccgcaggtgagtgagtcgtttttggtccataaccgttccttaagccagattgaccaccgaagcgttaaacccctcggcggatgatgtatgttgaaaccaggcgagctgctgatgcagctgcaccacttcgcctaccaccagcagggcgggcatcggggcgtctttcgccaggtgttcgagttgttgcaatgtgccggttatcgtctgctgatcgtcacgggtgccacgggaaatcaccgccaccggcgtgtcgctgtcgcgaccgtgggcgatcagctgggcgctgatttccgctgccttcatggtgcccatgtagatcgccagcgtttgttggctcttcgccagcagcgaccagtcgaagggggcgctgtccggcttatagtggccggtgacaaagacggcgctttgcgcataatcgcgatgggtcagcggaataccggcgtaggccgtcgctccggcggctgcggtgacgcccggcaccacctggaacgggatccccgcctcggctgcagcctgcagctcttctgcgccgcggccaaaaataaacggatcgccgcccttcaggcgcacgacggttttccccgccttcgccgcctccaccagcagctgattggtttcatgctgcggcaccgaatgctcgccggcgcgtttgccaacgcagatcagctcggcatcgcggcgcaccagctcgagaaccggctgagtcaccagatgatcgtggaaaaccacgtccgcctgctggatcgcctgcagaccgcgaagggtcagcagcccggcatcgcccggcccggcgccgaccagaataatttctcccgtctcacgttcgggcttatccagctcatcctgcagcgccttttccgcctccgctgagttgcccgccaccatcaggctggcgaagcggccggtaaagacgcgctcccagaagcggcgacgcgcttcggtagtcgtcaggcgggttttcagatggttgcgccagtagcttgctgattccgccagccgaccgagattcgtcggcagcagcgcttcgattttttcacgcagaatgcgcgacagcaccggcgctttaccgctggaggagatcgccaccagcagcggcgaacggtcgacgatagaagggaaaacaaacgagcacagcgcctggttatccaccacgttgaccaaccggtagcgcgcgttagctgccgcaaatacccgctggttaagcgcatcatcctcggtggccgcaatcaccagaaagacatcatccaccagcgagtcgctgaattccgtcgcccgccagctgagtgcctggcgcgcagccagatcggccagcgccggtgacagcgtttcagcgaccacctgcacctgcgcctgggcgcgcagcaggaacttgatcttacgttcagcaatctcgccgccgccgatcaccagcacgggcctttgtttcagttcggcaaaaaggggcaagtaatccacggtgcaacaactctcttacattcagcgatactgcgactatagggtgcgccttagagcaaatgaaattacgaaatggaatgagttgtgacacaaaggaataacgcggcggaaatacaaatatcaaaaagtgcttaacgcgctatttttccgctatttaagagcaattgaaattgtttaaccgcggtcacagtttcatactgtacgcgtcaaattgtcttgttcgtgtaaggaccccttatgttttccgcgttgtgccgccgtctgcttccgctggcgctcggcaccggttttgtttttgccgccgcccccgcattcagcgcgctgggcgacaccgccagtagccaggcccgccatatcgccaccgtcttcccgggacgaatgaccggaacgccgccggaaatgctctcagctgactatctgcgccagcagttcgccctgatggggtatcagagcgacgtgcgaagcttcaatacccgctatatctataccgacagcaatcagcgcaagaactggcataacgccaccggcagtacggtgatcgccgcccatgaaggtaaagtgcgccagcagattattatcatggcacacctcgacacctatgcgccgcagagcgataaagacgtggagaacaacctcggcggcctgacgctgcagggcatcgacgacaacgcgatgggacttggcgtattgctggagctggcggagcatttaaagaacgtccctacccgctatggcatccgctttatcgccaccagcggtgaagaggaaggccgtctcggcgcgcaaaacctgctgcagcggatgagcgaagcggaaaagaaaaataccctgctggtgatcaatctcgataatctggtggtgggcgataagctttacttcaacagcggccgcagcacgccggcctcggtgcgcaagctgacccgcgaccgcgcgctggctatcgctcgcagcaagggcatcgccgcctacaccaacccgggactcaatccggcttatccgaaaggcaccagctgctgcaatgacgccagcgtcttcgacaacgccgggatcccggtgctgtcggtcgaggcgactaactggtcactcggcaaaaaagatggctatcagcagcggagcaaatcggccagtttcccgcagggaaccagttggcatgacgtccagctggataatcagcagtatatcgaccacgcgctgccggggcgcatcgaacaccgcggacgcgaggtagtgaaagtcatgctgccactggtgaaagagctggcgaaggtggagaagaaaagctaatacgcacaaaagaacgcgcggtatcgcccgcgtgttctttttgaattatcactcagaggaagagctaacagcttaaccctcgtgcaatccgcactcgcgtttaagcccgaagaaccgggtctcttcttctgccatgcccggctcccacttgcgggtggtgtgggtatcgcctaccgagagatagccctgatcccacagcgggtggtacttcagcccgtgcttttgcaggtactgatacaccgtgcggttatcccagtcgataatcggtagcaccttgaacaccccgcgctggaccgccagcaccggaagcgtagcccggctgcccgactgctcgcggcgcagaccggcaaaccacgtctgcgcgttgagctctttcagcgcccggttcatcggctcaaccttgttgatctcattgtatttctcaatgccctcaacgccctgctcccacagcttgccgtagcgcgcctcctgccaggccgcgctttcagccgcgcggtagaccttcaggttcagcttgagcttgtccgtcagctcgtcaataaactgataggtttccgggaacaggtagccggtatcggtgaggatcaccggaatgtccgggcggatctgattcaccagatgcaaacttaccgccgcctgaatgccaaagctcgacgacagcacatagtttcccggcagattttccagcgcccacgccacacgcccttcggcgtcaagcttttccagttgggcgttggtttccgcgagtgccagaatgcgttccactttcggcaatgcattaagcgcgtttagatcgagtacggacatatgaacctcgtttgcctgttttgccggacgacactgcgttcgtccggcctacgggtttcgctggcccggatcgctacgcgccaccgggcaccaggatgttattcccagaaatcgcgggctgggtcgagcaccgggcgaatgatgcccgcacgcaccgtaaaatcgccgaagccttcacccgcttcgcgctctttcgcccagcgccctaccagttcgtctagcgagtcgagaatttccgactcggtaatattctcacggtacatccgcgggatgcgggtgccgttgcggttaccgccgatgtgcaggttatagcggcccggcgctttgcccaccagtcccacttccgccagcatcgcgcggccgcagccgttcgggcagccggtgacgcgggtgacgatatgctcatcgctcacgccgtgcttgctcatcaccccttccaccttgtcgataaacgacggcaggaaacgctcggcttccgccatcgccagcggacaggtcgggaaggagacgcaggccatcgagttttcgcgctgcggggtgacggcattcatcaggccatgatcccgcgcgagcttctcgatccgcgccttctgatcttccggtacgctggcgacaatcaggttctggttagcggtgatgcggaattcgccttgatggaccttagcaatctccagcaggccagtcttcagcggacgacccggataatcgagaatgcggccgttttcaataaacagcgtcaggtgccacttatcatcaatccccttcacccagccgatgcgatcgccgcggccggtaaattcgtacgggcggatcggctcaaacttaatgcctgcccggcgctccacttccgctttgaaggtttcgacaccgacgcgctcaagggtgtacttggttttcgcattcttacggtcggtacggttgccccagtcgcgctgggtggtcacaaccgcttccgccaccgccagcgtatgctccagcggcagataaccgaattcgctcgccgtgcgggcgtaggtttttttgttaccatgttcgatagagagaccgccgcccaccagcaggttaaagcctaccagcttgccattttcggcaatcgccacgaagttcatgtcgttagcgtgcagatcgatatcgttctgcggcgggatcaccaccgtggttttaaacttacgcggcagataggtctggccgaggatcggctcttcgtcggtagtggcgacctttttctgatccagccagatctcggcataagcgcgggtacgcggcagcagatgctcagagatctttttcgcccactcgtaggcctcagcgtgcagctgcgactcgtaggggttggaggtgcacagcacgttacggttcatatcgttggcggtggccagcgcgtccagccccaccgagtgcagcatctgatgcaccggcttgacgttctttttcagaatgccgtggaactgaaaggtctgccggttggtcaggcgaatactgccgtaaatggtgttctcagcggcaaacttatcgatcgccttccactgggtggtggtgatcaccccgcccggcagacggcagcggagcagcatcgcatgacgcggctccagcttctgggcggcgcgctccgcgcggatatcgcgatcgtcctgctggtacatgccgtggaaacggatcagcaggaagttatcgcctttaaaaccgccggtcagaccgtcgtttaaatcttccgcaatggtgccgcgcaggtagttgctctcaagcttcatgcgctcggcatcgctcagtttaccttcgaccactaaaggccccggatgtttttcgctcattagtagacatctcgctgataacggcgctcaacgcgcagctcacttaaaaattcgtccgccgcttcggcgtccatcgcgccgtattcggcaatcacttccagtaaggtgttttccacgtccttcgccatacgattggcgtcgccgcagacataaatgtgggcgccgtcattgatccagcgccacagctcggccccctgctcgcgcagtttgtcctgcacatagattttttgttgttgatcgcgggaccaggccagatcgatacgggtcagcagaccttccttcacatagctctgccactccacctgatagaggaaatcttcggtgaagtgcgggttgccgaagaacaaccagttcttgccttgcgctccgtccgcagcgcgctgctgcataaaggcgcggaacggcgcaataccggtgcccgggccaatcatgatcaccggggtctccgggttggctggcagacggaagttgtcgttgtgttcgataaagacacggacttcgccatcctcttccacgcggtcggcgaggaagctggaggcgccgccagcccgggcgcggccttcaatttcatagcgcaccacgcccacggtgacatgcacctcgctctccacttccgcctgtgaggaagcaatagaatacaggcgcggcgtcagcggacgcagcagaccgattaacgcctcagcgtccagctgcgctggagagaaacggaccatatcgacgatcggcgtcgcggcggcatactgctgcaactgagctttgtcgcccaccagcggcagcagcgattcgctgcgcgtcagggtggcgtagttttcaacgatagtcgcggtgttaaccgtcagctcaaaatgccactgcagggcttccgacagcggcagagttttaccctcaacggtcaccggctcgtcgcctttcagccacagcagctccaccagctctttcaccagctgaggatcgttctggtaccagacgcccagggcgtcgcccggctgatagcgcagaccggaatcaccgaggtctatttcgatatggcgcacatctttttctgaattgcggccggtgattttctgattgaccgacagggtcgccgtcaggggcgcttctttggtatatgggctggtgtgaatatcgttcaccgcgccgctggtggccagctgagcgggcgcagcgaccggcgcacgggccttcagcgcctcaaccacgcgcgcgcgccattcagcggccgcggcctgatattcaacgtcggcatcaacgcgatcgagcagacgttccgcgccgagctcggccagcttgttgtcgaaatctttgccggactggcagaaaaattcataagaggtatcgccgagaccaaagacggcgaacgcagtcccgtccagcttcggcgctttcttagagaacaggaacttatgcaatgcgaccgcttcttccggcggctctccttccccctgggtggacgtcactaccaccagcagtttttccgcagcaatttgtttgaatttataatcgcctgcattcaccagcttcacgttcagcttcgccgccagcagatcgtcacgcagcgcttcggcgacgcggcgggcgttgccggtttgcgaggcggaaatcagcgtgatcgtcggtacctcggcggccggggcgggggcggctaccgccgcgccggactgctgattcagcacgccccagaaatagccagatacccaggcgagctgagtgggcgtgaagtcagtggtggccgcctgaaggcgcgccagttgctccgggttgagcggcagcaagttggaaggtggggcctgtgtcgtcatgcgtcgtttgttccagtaagcaaagctgttattcgcaccctgtcagcgcgacaaaaacagaagagaatagaaggttaacggcgggcatagtaacaattaaagaagggatggaaataataaataaccaaatggactaacctgttttagttgtagttattaacaacaaaatcgattaaataagcaattgaaatataagagattaaatcaaataaagcagataaacatgtccattttctgttcacggccgttttagttaatgcgaaaaaatgtactttccggtaccctacggcggtttttttcgtcctgttgagagtcaatgatgtccaccacgctgtttaaagatttcaccttcgaagccgcccaccacctgccgcacgtcccggaaggacacaaatgcggtcgcctgcatggccactcctttatggtgcgtctggagatcaccggtgaagtcgatccccataccgggtggatcatggattttgccgagctgaaggccgcctttaagccgacatacgatcgcctcgaccactattatctgaacgatattcctggtctggaaaaccccaccagcgaagtgctggccaaatggatctgggatgagatgaaaccgcgggtgccgctgctgagcgccgtgatggtcaaagagacctgcaccgccggctgcgtctatcgcggcgagtaagcgaaaaaaagcccggtcagtacgctgccgggcttttttatcaggcaatattcagatacttgtgcgtctgcatagacaggcgccagttgcgggcgatgcaggtgtcgatacacaggcgcgtcgcatcttctttctgactgatcggctgcagggcgatgatccgcggtttgtcatcgctcagcgtttccagcagttcgtccagcgcttctatgtcgcggacgcgccctaccggatgcttgatctcatccgcccgctgcagggcctgagacagcacgtcatagccaccgcgcatgttgaccttcggggaaaccgtcacccaggtattggggctgcagcgtacttcatgggtgccgctggtttcaatctgacagctaaagccgttttgttccagaagcgaggttaacggcgttaaatcatgaatgcagggctcaccgccggtaatgaccacgtggcgggctgtccacccctgccgcccaataatcgccagcagatcctcgctgcttgccgggccccacttgtcgctctctttggttttcgccaggatgctgaacaacgacacttcccgatcggccagcttgtcccaggtatgcttggtgtcacaccacgcgcatcctaccgggcatccctgcagacgaataaagatggcaggcacgccggtgaagtaaccctcgccttgcagggtctggaacatctcgttaatcgggtactgcatagtcatctctgtttagggtgataaacgttcattatcgcagatttcgctgcccaggtcttgtcctgcgctgcgatcgcttttttacccctccgtcaatatccgtgtcgggaataatattattgattaaaaaggcaatcttttcttttggcttagtttattagcatgataagaattaaaataaatagcattctgacgcgcgggggggaaatatgtaacaaaaaatgttattcctgtcattcaggataaaataaaaggtccaagaaccaaaataaaaaaccttaaaatacagtaatgtacaaactgatacatgaaagagtgaattatctggccgatctgcgagtccaattctatcccccggtaataataaccttaaactggtcttaataaagccctgatcgggccccttttttatttaattgtcgtttacttttgcccgcctagaatcccgcagaccaaccataatgagatagcgtttatgaccacattattcattaccggcgttacggggtttctgggcggtgccgcgttagagaaaatactccatcaggaaacccggttagatctgctgctgctggtacgtgctgatagccccgaggctggcctcgaacgggttaaagagaacatgcgtaagttcaacatcgccgaggagaagctggcgatgttgcgccagcagcatatcctgctgggcgatctcgcctctccggagcattttcttaacgatccgcgcctcgatcaggtcacgcacatcctcaactgcgccgctgtcgcctcatttggcagcaacccgcttatctggaaggttaacgttgagggcacgctgcgcctggcgcaacgtatggcgcaggtgacgggtctgcagcgctttctgcacgtcggtacggcgatgtcatgttcgcctgaaccggattcactggtcgccgaaagcgcggagtttcgggaacgcgctgagcacctggtggaatatacccactcgaagtcgaccatcgagcagctgatgcagcagcagtgccctacgctaccgctggtaattgcccgcccctctatcgtggtgggtcatacccatcacggctgccggccttccagcagtattttctgggtgttcagcatggggctgatgctgcagaaattcatgtgctccatggaggaccgaattgacgttatcccggtggactactgcgccgacgccctgctaatgctgcttaaccagcctctggctcacggcgaggtggtgcatatctctgctggcgaagagaacagcgtgaagtttgccgaaatcgaccgggcgatggctcaggccctggagcaggcgccggtgggggataagtacgcccaggtgagctatgaaacgctggtcaaaatgagacgcgaactgaaagggatatttgggccatgcaatgagcggctgatgctgaaagccatgcgcttatacggcgcgttcgccacactgaacgtgcgctttagtaacgacaagctgctgagcatggggatgccaaaaccgccgcgctttaccgattacatcgaccgctgcgtggaaaccacccgcgggttgtcgatccctcagcaaatggccgtcgactttaaataatggccgcaggcgtaaaaaaaatgccagcccgaaggctggcatgattatttcacaaggataggattaagcctgacctttgatctctttacgaccgttgaacggcgcttgctcacctagcgcttcttcgatacgaatcagctggttgtatttagcaacgcggtcagaacggctcatagaaccggttttgatctggcctgcagcggtaccaacagccaggtcggcaatggtagcgtcttcagtttcgccagaacggtgagagataacagcggtgtagccagcgtctttcgccatcttgatagcagccagagtttcggtcagagaaccgatctggttgaacttgatcaggatggagttagcgatgcctttttcgatgccttctttcaggatcttggtgttggttacgaacaggtcgtcaccaaccagctggattttgtcgcccagtactttggtctggtaagcgaaaccttcccagtcagactcgtccagaccatcttcgatggagacgatcgggtactgtttggtcagctcttccaggaagtgagtgaactcttcagaggtgaacgctttgttgccttcgccagccagaacgtatttaccgtctttgtagaattcagacgccgcgcagtccatcgccagggtgatgtctttgcccagctcgtagcctgcagctttaaccgcttcagcgataacagccagcgcttcggcgttggaacccaggttcggcgcgtagccgccttcgtcaccaacggcagtgttcatgcctttggacttcagcactttcgccaggtgatggaacacttcagaacccatgcgtactgcttctttcagggtcggcgcgccaaccggctgaatcatgaattcctggatgtcgacgttgttgtcagcgtgctcaccgccgttgatgatgttcatcatcggaaccggcatggagtatttgcccggagtgccgttcagttcagcgatgtgcgcgtacagcggcaggcctttggacgcagcagctgctttggcgttcgccagagaaacggccaggatagcgttcgcaccgaagttagatttgttttcagtaccgtccaggtcgatcatgatcttgtcgatgccagcctgatctttagcatctttgcccaggattgcctgagcgatcgggccgtttaccgcagcaacagctttggttacgcctttacccaggaaacgggatttgtcgccatcgcgcagttccagcgcttcgcgggaaccagtagaagcacctgacggagcagctgccataccgacgaaaccaccttccaggtgtacttcggcttcaacagtcgggttaccacgggagtcgatgatttcacgaccgatgactttaacgattttggacattaggttttcctcagtacaagttaaactaaaactccagacaaacaatgcacccggatgggtgcattgccgttcaaactctttttacttcgcctggcgtttctggtactcgctcgcggctttcacaaagccggcaaacagcgggtgtccatcacgcggcgtcgaagtaaactccgggtggaactggcaggccacaaaccacggatggttcggcacttcgatgatctcgaccaactgatcatccccggaacggcccgcaacgcgcagaccagcagcttcaatcggtttcaacaacatgttgttgacttcgtagcggtgacgatgacgctcggtgatggtcggctcgccgtaaagctggcgtaccagagaatcatcactcagctggcactgctgcgcgcccaggcgcatggtgccgcccagatcgctcttctcagagcggacttcaacgttgccatcttcgtcacgccattcggtaatcagggccacgaccgggtatttacagtctggcacaaattccgtcgagttggcgttttccatacccgctacgttacgcgcgaactcaatcagcgcaacctgcatacccaggcagatgcccagataaggaatattgttttcacgcgcatagcgcgcggtggcgatcttgccttcaacgccgcggtagccgaagccgcccgggatcaggatagcgtctaaatccttgaggatttcgacgccgcgcgtttccacatcctgcgaatcgatcagcttgatgttgacggtaacgcgatttttcagaccgccgtgtttcagcgcttcaatcaccgacttgtaggcatccggcagttcaatgtacttaccgaccataccgatggtgacttcgcctgccggattagcttcttcatagattacctgttcccattcggccaggtttgcttccggacaagttaagctgaatcgtttacaaatataatcgtccagcccctgagatttcaacaggcccggaattttataaatggaatcgacgtctttcagagaaatcacagccttttccggaacgttacagaacaaagcaattttggctcgttcgttggccggaaccgcgcgatcggagcggcagatcagaatatcaggctgaataccgatggagagcagctcttttacggagtgctgggtcggcttggttttgacttcgcccgcggcggccatgtacggcaccagagtcaggtgcatgaacagggtatgctcgcggccgatctctaccgccatctgacgaatcgcttcgaggaacggcagggattcgatatcgcctacggtaccgccgatttccaccagcacgacgtcatggccttcgccgcccgccagtacgcgctctttgatagcgttggtgatgtgcgggataacctgaacggtcgcgcccaggtagtcgccacggcgctctttgcgcagcacgtcggagtagatacggccggtggtgaagttattgcggcgcgtcatcttggtgcggataaaacgctcatagtggcccaggtccagatcggtttctgcgccgtcttcagtaacgaacacttccccatgctggattgggctcatggtgcccggatcgacgttgatatacggatccagtttcatgatggtcacgttgagaccacgggcttcaagaatggctgccagggaggctgcggcaatgcctttacccagagaggatacgaccccgccggtcacaaaaatatagttcgttgtcatgctgaacctgagaagttagggtaaaacgatggaataaccaggacgggaaagtagtatacccgaacatgcgtgacgccacaaactttcattcttcccctccccttcgttcttcaagttgcacctgtgttgcgactcgaacaactcgaagaggcaggctacatggtgtttcaacgacataacggaaagagaaaatagacgcttttggcgaaatgtttttgacgtaaatcaagcgcttgttatttataaaatcacacaaatcgcgcttgatcacgaaaatccgttagagatcagtttcctggcgttttacttcctgccacacttcttccatggtatcgaggtcgacgccggtcatttccaggcctcgggcggcgacaatacgctcgacctcgcggaagcgacgctcaaatttgaggtttgctttctgcagcgccacctcggctttgacgcccaaatgacgggataagttcaccgtggcaaacagcagatcgcccacttcctcttccagttttgcttcatccaccaccgcctgctgcgcttcatgcatcacttcatcaatttcttcatgcactttgtcgagcaccgggcccagcgaggtccagtcgaaacccactgccgagcagcggcgctggattttatgcgcgcgcatcagcgccggcaggctatggggaatatcgtccagtgccgaatgctgggctttttccgcccgctccgcgcttttgatttgctcccagcgagccaggacttccgtgctattgcccgccgatgcctcgccgaagatatgcgggtggcgacgctccagcttgtcgctgatggcggcgcagatatcgtcaaagttaaagcgtccctcttcctgcgccatttgcgcatagaacaccacctggaacagcagatcgcccagctcaccgcgcagatcgtcaaaatcttcccgctggatagcatcgaggacctcgtaggtctcctcaagggtgtaaggggcgatggtggcaaaggtctgctctttatcccatgggcagccgttttccgggtcgcgcaggcggcgcatgatgccgagcaagcggtcaatttgagtcatgtgacaatcctggaaatttaaaaaatagtcggccggataaggcgtttagaccttatccgacgttgcgaaattgccggatggcggcttcgccttatccggcctgcagatgaattaaccgccgtgcagacggcgcgcgtcgatcacatccggcacctggttgagcttaccgagcacccggcccagcacctgcaggttgtaaatctcgatggtcatatcgatggttgccagctgctgacgggtatcgctgcggctggcgacgcccagcacgttcaccttctcattggcgaggatggtagtgatatcgcgcagtaaaccgctgcgatcgttcgcctccaccctgaccaccagcgagtagcccgccgagtagctttcgccccataccgcatcgacgatgcgctccggagcatgcgactgcagttcagccagctgatcgcagtccgcgcgatgcacggagatcccgcgcccctgggtgataaagccgacgatctcgtcgcccgggattggctggcagcagcgggcaatatggtgcatcaggttgcctaccccttccaccactacccggccattgtccttggtgcgattttgcggcgtgtaggttttctgctgcagttgcttcagcgcggccgcatcctgctcggcggcgctaggtttattgaactgcgcctgcaggaagttgaccatctggttgagacggatatcgccaccgccgatggcggccagcagttcatcgagctcgttgaagttatagcgcggcagcaggtgcttttccgcatccttcaggctgatgcccaaatgctccagctcgtcgtcgaggatctgccgaccggcgagaatgttcttgtcgcgatcctgcttacggaaccaggcgtggatcttcgagcgtccgcggctggtggtcacatagccgaggttagggttcagccagtcacggctcgggttcggctgcttctgggtaataatttcgatctgatcgcccatctgcagctggtaggtgaacggcacgatgcggccgccaattttggcgccgatgcagcgatggccgacatcgctgtgaatatgataggcaaagtccagcggcgtcgaccccgcaggcaggtccaccacgtcgcctttcggcgtaaagacatacacccggtcgtcgaagacctggctgcgcacttcatcgagcatctcgccggagtcggccatctcttcctgccaggcaatcagcttacgcagccaggcgatacggtcttcatagccgcggccgccgctggtgccggctcccgcgccctctttgtacttccagtgcgcggccacgcccagctcggcgtcttcatgcatctgccgggtgcggatctgaatctccaccgtcttgccgctcggccccagcaccacggtatgaatagactggtaaccgttgggtttcgggttggccacgtagtcgtcgaattcatccggcagatggcggtagtgagtatggacgatccccagcgcggcatagcaatcctgcaaacgctcagccacaatacgcaccgcgcgaacgtcaaacagctcgtcgaaagcgaggtgttttttctgcattttgcgccagatactgtagatatgcttcggccggccatagacttccgccttgacgccttcggctttcatctctgagcgcaggtggccgacaaactcttcgatgtaatgctcgcggtcgatacggcgctcgtggagcagtttggcaatgcgcttgtattccgccgggtgcagatagcggaagcagtaatcttccagctcccacttcagctggccgatacctaagcggttcgccaggggagcatagatattggtgcactctttcgccgcaagaacgcgctcatcttccggcgcgtccttgacctcgcgcagatgcgcgatacgctcagcaagtttgatgaccacgcagcggaaatcgtcaaccatcgccagcagcatacggcgaatgttatccacctgctcggaagagaccgagtcggtatgggtagccttcagctggcggatagcggccatgtcccgcaccccgtgaatcagggtcacgaccgatttacctacgctctcctgcatcacctcttcgctgacaacttcgccgtcggccagcgggaacagcagcgccgcgcgcagcgtatcgatgtccatacttagggtggaaaggatctccaccatttcgacgccccgccacagcagcaggtccgcctgcgggtgtccttgcgttttttcgcgacaataatcccaggtttcggctaagcgctcacacgactgctggctggaaattcccagactcgcgatccatttcttcgggtcaaattcaccagctttattaagatgtgcacttcttaccgcaaccattgtcctctccttaagggaccggcctgccgaagtcggcaagcctcaactttctacatgtcatcctgcaggtcgcgtcagcattcatggccagggtggctcttctgcgacgttgtgaatgaccttatgtaagcctgcgctcaaacaacaccattgattccagatggccggtatgcgggaacatatccagcatcgccaggcgttgaatctgatatccagcctgcaacagggtttcgctgtctcgcgccagcgtcgccgggttgcaggaaacatacaccacccgccgcggtgccagttttattatatgcggcatcacgcccggcgcgccggcgcgggccgggtccagcagcactttatcaaagccgtgcttcgcccaggcctgacgggtgacgtcttcttccagattttcatggaagaaagtgacatttgataaaccattgcgggcggcgttttcccgccccttctccaccagcgccggcaccccttccacgcccaccacatgggcggcgcgtgtcgccagcggcagggtaaagttgcccatcccgcagaacagatccagcacccggtcctctggccgcagatccagccactccagtgcggtacgcaccatctgctgatttacgccgtcgttgacctggataaaatcccgcgggctgaacactaagcgtagtccgtctgaggtataccatggcgcttcgccatgaatatgctccagtatctcgctttgtggcgcgaggtacagggaaagaccgtgagtttgcgaaaagcgttccagtttttccctgtctgtcgccggcagggctgcggtatggcgcagcaccatcagcgggccattgtccgcctgcaccagctcgacgtggccgagatggcgtaatgcgctcagcgcgcttaagcactcgcgcacagcgggcagcaatgcctcaagttggggcaccaaaacagggcactgcaccacatcgacgatcgctttggcgttggcctggcgaaaacccatctgcaattgttgggtcttcggctgataattcaagctcaagcgtgcgcgacggcggtagccccacggcgcgccggcgatgacgtcatctacctcgcgcttcatcagtcgccccagcgcggcgcgtttactttgctgctgaagcggaacgctggcatgttgttgttggcatccgccgcagacgccaaaatgggggcagcgcggcgcctggcgctgcgggctgtcggtcagtcggcgtttcacctcggcgcgggcgtactgttttttatcttccaccagcaccacctcggcctgctcgtggggcagcacgccgctcacgaacagcgccttcccctgatggcgggcaacaccctgaccaaagggatcgaggtcgttgactgtaacggttatgatctggcgcgtcgtcacacgccgttttgcagagtagaattgcgccatcgtagagagttgtctcaatcaaataaaacgagctcgttcagagcggcagcgccgcgaggcgcagcgacgctgcacagaacgatgatgtctatattctcccataatggaaccgcatgaccaactacagcctgcgtgctcgcatgatgattctgattctggcgccaaccgtcctgataggactgttgctcagtattttctttgtcgctcatcgttataacgacctgcaacgccagctggaggacgctggcgccagtattatcgaaccgctggcggtctccagcgaatatggcatgaacttgcaaaaccgcgaatccatcggccagctgatcagcgttctgcatcgtcgccactcggagatcgtgcgggccatctcggtgtacgattcgcataaccgcttatttgtcacctccaattaccagctcaatcccagcgaactgcagatcccgaaaggcgaggcattcccccgtcacctcagcgtcatccgcgatggcgacatgatgatcctgcgcacgcctattgtctcggaaagctattctccggatgaatcacccgaatctgacgctaaaatgccgggcaatatgctgggctacgtcgccctggagctggatctaaaatcggttcgcctccagcagtacaaagagatttttatctccagcgtaatgatgctgttctgtatcggcatcgcgttaatcttcggctggaggctgatgcgcgacgtcaccgggccaatccgcaatatggttaacactgtcgaccgcatccgccgcggacagctggacagccgggtcgaaggctttatgctcggcgaactggatatgctgaaaaacggcattaactcgatggccatgtcgctggcggcataccacgaagagatgcaacacaacgtcgaccaggcgacctccgatctacgggaaacgcttgagcagatggagatccagaacgtcgagctggacctggcgaaaaagcgcgcccaggaggcggcgcgcattaagtctgagttcctggccaatatgtctcacgagctgcgcaccccgctcaatggggtgatcggctttacccgcctgacgctgaaaaccgatctcaacgctacgcagcgcgaccacctgaccaccatcgaacgttcggccaacaatctgctggcgatcatcaatgacgtgctcgacttttccaagctggaagccgggaagctgatcctggagagtattccgttcctgctgcgcacttcgcttgatgaagtggtcaccctgctggcgcattccgcgcacgataaagggctggagctgacgctgaatattaagaacaatgtaccggataacgtcattggcgatccgctgcgtctgcagcagattgtgaccaacctcgtgggcaacgccatcaaatttaccgagcacggcaatatcgacgtactggtggagcagcgggccatcagtaattcccgggtacagatcgaaattcagatccacgataccggcatcggcatccccgagcgcgaccagtcccggctattccaggccttccgtcaggccgatgccagtatttcacgccgccacggcggcaccgggctcgggctggtgatcactcagcgtctggtcaaagagatgggcggggatatttcgttccacagccagccgaaccgcggctccaccttctggttccatatcagcctcgatctcaacccgaacgccattccggatacgctgaacaccgacgggcttgtcggcaaacgtctggcctatgtggaagccaacgcgacggcggcgcagtgtaccctggagatgctggccgctacgccgctggaggttatctatagccctaccttctcctcgctggcggaagcgcagtatgacattctgctggtcggtatcccggtttcaatgcgcgatttgtcgccgcatcgggaaaaattagccaaagcctgcgcgatgtccgataacgtactgctggccctgccgtgccatgcccaggtcagcgccgaagccctgaagcgcgacggcgttgccgcctgcctgttaaagccgctcaccaccacccgtctgctaccggcgctggtggctaccagccacgcgcttgcctccgcgccgctgatgcagatcgacagtcataagttgccaatgacggtaatggccgtcgacgacaacccggctaacctgaagctgattggcgccctgctggatgatcttgtgcagcaggtgatcctctgcgacagcggccagcaggcggtggacaaggccaagcagctgcagatggatctgatcctgatggatattcagatgccggatatggacggcatccgcgcctgcgagcttatccatcacctgtcccatcatcagcaaaccccggttattgcggtcaccgcgcacgccctggagggccagcgtgagaaattactgagcgccggcatgaacgactatctggcgaagccaatcgaagaagagaaactgcacgcactgctgctgcgctatcagcccggcctgcacagcgtcgttccggcgtcgctaccgcccgcagagccgatcgtcgatcataatcaaacgctcgactggcagctggcgctgcgccaggcggccatgaagccggacctggcgcgggagatgctgcaaatgctgatcgcctttatgccggaggtgcgtaacaaagttgaggagcagctggtgggcgagcagccggaagggctggtggatctgatccataaactgcacggcagctgcagctatagcggcgtgccgcggctgaaaaagctgtgccataccctggaaagtcagctgcgggcaggcaccgccgccgaggatctggagccggagctgcttgagctgttagatgagatggataatgtggcccgcgaagcgtgccggatgggggtgtaaaccccggatagcggcgctacgcgcctcatccggcctacgccctacggtccggtattcggttggtagccccggtaagcgtaagcgccaccggggatggttcccggatcgcggtgctacgcaccttatccggactacaaataccactgcgccagccgggttaccgcctgtcgcccatctgcaaaaccgcggctacgttacgcgccgtcattcgcaggttggcggcggcattggccaacgcttcatcaagggtacagatggtatacaacacgctgaataccgcatccagcccgtgctgatgcacgacgccaacatcggcggtaagactgccggcaatcccgatcaccgggacgttaaaacgcttcgccaccctcgccacccccaccggcactttgccgtggatcgtctggctatcgatacgcccttcgccggtgatcactaaatcggcatccgccacccgctcagccagctgtagcgcatcggtgacaatctcaatgcccggacgcaactgagcaccacagaacgcatacagcgccgcacccatgccgcccgccgcgccgccgccctcaaggctcagcacgtcgatatctaaatcgcgggcgataatccgggcatagtgccgcaggccgctgtcgagccggtcgatcatctgcgctgtcgcccctttttgcgggccgaacaccgcgctggcgccctgcgggccggtcaacgggttggtgacgtcgcaggcaacgtcaatccggcaatctgccagccgcgaatcgagttcgctgagatcgattcgcgccagcgtctccagcgcgccgcccccggaggcgatttgctggccctcggcggtcagcagtttcgcccccagcgcctgcgccatcccggcaccgccgtcattggtcgcactgccgccaataccaataatgatctgtcttaccccggcgtccagcgcatggcggataagctccccggtaccccaggaagtggtcagcagcgggttacgctgtgccggcgggacgctctccagaccgctggccgccgccatttcgataaaggcgcactggcgatcgccggacagcccgtaaaatgccttaaccggctcgcccagcggcccggtgaccgtcaacggaaccagaagcccgccggtcgccgccaccatggcttccaccgtcccttccccaccatcggcaaccggcagcttgacgtactcggcgtcaggataaatctcgcgaaagccttgctctatcgcactggccacttccagcgcgctcaggctctccttccaggaatccggtgcgatcactattttcatctgctgtccttactctgagccaacccctggcgctgtcgcgcaatgccggcccccgcagaggccggcggacttttagcgcaccatgcatggacgcttgttgtcaaaggtccagcccgggatcagatactgcatcgccatcgcatcgtcgcgggcgccaagaccatgtttcttatatagctcatttgcctgcatcacgcggtccatatccagctcaacccccaggcccggggtactcggtacctgcaccatgccgcctttgatttcaaaaggttgtttggtcagacgctggttgccctcctgccagatccagtgggtatcgatagcggtgatcttgcccggcgccgctgccgcgacgtgggtgaacatcgccagcgacacgtcgaagtgattattagagtgcgaaccccaggtcagaccgaactcatggcacatctgcgctacgcgcaccgacccctgcatggtccagaagtgcgggtccgccagcgggatatccaccgattgtagcgacagcgtatggcccatctgccgccagtcggtggcgatcatattggtggcggtcggcaggcccgtcgcgcggcggaactcggccatcacttcgcggccggagaagccctgttcggcgccgcacggatcttccgcataggccagcacgcccttcagctgtttaccaatctgaatggcctcctcaagcagccaggcgccattcgggtcgagagtgacgcgagcattcgggaagcgcttcgccagggcgctgatcgcttcggcttcttcaaaaccggccagcacgccgcccttcagcttaaagtcgttgaaaccatatttttcatacgccgcttccgccaggcggaccaccgcatccggcgtcatcgcctcttcatggcgcaggcgataccactcgcactgctcatccggctggctctgataggccagcggcgtcgcatggcgattaccgacaaagaacagatagcccagcatttcgacttcgctgcgctgctggccatcgcctagcagcgaggcgacgttgaccccaaggtgctggcccagcagatccagcagtgccgcttcgatgccggtcaccacgtgaatggtggtgcgcaggtcaaaggtctgcaggccgcggcccccggcgtcgcggtcggcaaactgattgcgcaccgcgcccagcacgtttttatactcgcccagcgttttgcccaccaccagcggaatggcatcctccagggtctggcgaattttttcaccgcccgggatttcaccgacgccggtatggccggcgttatctttgataattacgatattgcgggtgaagtacggggcgtgcgcgccgctcaggttcatcagcatgctgtcatggccggcaaccgggatcacctgcatggtggtgacaacgggcgttgaagagaaagtcgtcatagcatcatcctttttaattagtggcggccgaaaacgggacgtttgcggtcgaatgtccagccggggatcaggtactgcatcgggcccgcgtcgttgcgcgcgccgcccggcagcgctttataggcctcatgggctctgcgcacctgctcccagtcaagttccacgccgagtcccggcgcgtctggcacggcaatgctgccgttaataatctgcagcggatttttggtcaggcgcgcgtcgccctcctgccagatccagtgggtatcgatggcggtggggttgcccggcgcggcggcgccgacgtgggtaaacatcgccagggaaatatcaaagtggttgttggaatggcagccccaggtgagcccccagtcgtcgcacagctgcgccacccgcaccgcgccggagagcgtccagaagtgcgggtccgccagcgggatatcgacggcgttgagcatcaccgcatggcccatttcgcgccagttagtggctatcatattggtggcgaccggcagcccggtggcgcggcggaactcggccatcacctcccggccggagaaaccctgctcggcgccgcacggatcttcggcgtaggtcagaacatcctgcagccctttacacagcgcgatggcctcatccagcagccaggcgccgttagggtcgacggtgatgcgcgcatccgggaaacgctttttcagcgcccgcgcggtgtcgatctcctgctcgccgggcagcacgccgcctttgagcttaaagtctttgaaaccgtagcgatcctgggcggcttccgccagacgcactaccgcctcgctgctcaacgcctgctggtggcgcaggcggtaccattcgtgatcgcccggcgtatggtccagatagccaaggtcggttttctgccgatcgccgatatagaacaggtagcccagcacggtgacggcatcacgctgcttacccgggcccagcagctcgcagaccggcacattaagcacctggccgagcaggtccagcagcgccgcttccagcgccgccaccgcgttaaccttcagttcgaaggtccacgcccctttgccgaaggtgtcgaaatccgccgcctgattgcctttgtgcacctgctgcaccacgcgattgagtcgggcgacctcctggcccaccacctgcgggatcgccgccagcagcgtctggtagatgacctctccgccgggcgcttcgccgacgccggtatggccggcgttatcggttaacaccacgatattgcgggtaaaccatgcgttatgcgctccgccgatgttcagcagcatgctgtcgtgcccggccaccggaatgaccttcatctctgtgataatcgggctggattgagtagtcatgattaacgtcccgctacaggtttcagttcgatacgtttgatatcgcccaccagcaccagatagctcagcaccgccaccagggcatggataccgacgtagatcagcgcgccgttgaacgagccggtggtgccgacgatatagccgatggcgatcggggtgacgatgccggagatattgccgaacatattgaacagaccgccggagagaccgctaatctctttcggcgcggtatccgccatcaccgcccagccgagggcgccgatccctttgccgaagaaggccattgccataaagccgatcaccatccactccacgttgacatagttacacatcagcatggtcatggagagcagcatccccagcacaatcggcgttttgcgcgcaatgttcagcgagccggtgcggcgcattaaccagtcggagatcaccccgcccagcaccccgccgacaaagccgcacaccgccggaatggaggcgacaaagccggctttgaggatcgacatgccgcgcgcctgcaccagataaaccgggaaccaggtgataaagaagtaggttaaggcgttgatgcagtactgaccgatatagatgccgatcatcatccgcgagccgatcagttgcttgatctgccccattttgacgctaaacggcactttctgcgcgctgctcttctgatccatgttgatcagcgccccgccttcggcgatatagtccagctctttctggttcacgcccgggtggttgttcggatcgtggatcactttcagccacacaaagctgatcacaatccccagcccgcccataaagaagaacacatgcgaccaacccacctcatgcgtcagccagcccatgatcggcgcgaaaataacggtggcaaagtactgggcggagttaaaaatcgataccgctgtccccctctcctgcgccgggaaccaggcggcgacgatccggctgttgccggggaatgacggcgactcggcaaggccgacgaggaagcgcagggtaaacagcgcaacgataatgccaaagccgctgaagatatcgacgaagccctgcagcagggtaaacatcgaccagatgaagatcgaccagaaatagacgcgcttcgagccgaagcggtcgagcagccagccgcccgggatctggccgatgacataagcccatgagaaggcggagaacacataccccatccccaccggatcaaggccgatatccctggccatttccgaaccggcgatcgacagcgtcgcccggtcgccatagttaaaagaggtgacgataaacagcatcaccactatccagtagcgggcgttggtgcgcttttcagccgccgtcgccgcctgacttaatgaactcattgttgtactcctgaatcatagcgtttagctacgttcattctgaacagcacaacctgtagggtaatcagaatgacgtggtcgtgttttgatagttgtcgttatatctggcactgcatttatcactggctggagcagtatatgaagaggcacaccgcggctcaccgtgcatccacacagcttttacgccgctattgcaggtggtttgtggcgaatgcctgaaagaatggggggaagttcacggaaatgaaaagccagcgccgctggcgccgcatagcgcagcaaaaagggccggagtgtgaaatacctcacttgacccggtgaaactggctggcttaagccatgatattgttaaggatattgtggcgtttgcctaaaggcgtggcgcctggaaagcgctactattttgacgtccgcgtatctggccgcgacgtattgaaagagcgccctctgcgtagggagagggcagcgcttttatgcgagcagggtggcccactgctcaacccacggattggagacgctctccggctccgggtcttcgctggcgtcaatcttcagcatctcgccgatgcgcttcgcgccctgctcctgcagcagctgatcgaacttcaggccgccgccgcaaaagttggcataggtgctgtcgccgagcgcgataatgccgtaccgcaggtgaggctgatacatatctttgatgccctcatacagcgggacgatgctgtccggcagatcgccctgcccggtggtggaggtgaccaccagcacatacttacccgtgtaggattcccagtcgttgacctgcggatcctcatacacggtagccttgtgtcccagtccgctgaggatcgcttccgcttcttccgcgaccagcagcgagttgccgtacatggtgccgacaaaaattccgacttccgccatgctattatctccctggattgaccttattctcttcatcctgaccgctgtcgtcggcaaactcaaccctttcatttagcgggagaagcccgcgccagccaaactgcgacagcgcgcgcatccagacgtcgtcaaaaccggcgcgcagggtcagcggctcgccggtaaaaggatgggttaacgacagctcgctggcgtgcagcatcaagcggtgacagccgaaatgttccgcggcactgcggttttgccgcagatcgccgtgcttgctgtcgccgaggatcggatgacggaggtgggccagatgacggcgcagctggtgcttgcggccggttttcggctccagttccaccagcccatagcgcgaggtgggatagcgcccagtcgccactggcatctccactgtcgccagaccgcggtagtgggttaccgctggctgcggccctttatcttcgcgggcgaacttatcggcgattctatccagctcctccaccagcgggtaatccagcagcgcctcttccatcagccagccgcggacgatcgcatggtagcgcttccggatctggtgctgctcgaactgttgcgccagcagccggcccgcctcgctcgacaatcccatcagcagcacgccggaggtgggccggtcgagacgatgagcggtaaaaacgtgctgaccgatctggtcgcgcacggtctgcatcaccaccactttctcgtcgcgatcgagccagctgcgatgcaccagccagcccgagggtttgttgaccgccaccagccagtcgtcctggtagataatctccagcatcaggcctgctcaccggcaaacagcgcgtctaacagcagaagttccgccagcatggattcgcggaccgggtgggcctgatccagagccatttcgtaataaggcgcaacggcaaaattttgcggcagcggctggccgctctccagcagctggtgcatacgcgggatcaggacccactgcagccactccagcggctccagggtatccaggcaaaacggcttatcgctggcgaaggcgctgctgtcaggcgccgtctcctgccagtgctccgtttcgcgcagcagggcttcaatggcgcgcaggcgatcgcgcacgctatcgtgaagagtcatggggaaacctcgatgagttaaaaaccgggcgcaggatagcaaatccgcaggagaaataaaaaaagggagcactgtataaacagtgctcccggttcgttttgcagcagtcccgctacattggtgctccctgctcgtccttgaaaacttttcctgaggtctcctgaccatgttcatccataaacacgtgcatcctgctttcacaccaccccgatgcgaaatgacttatccataagtttgtcccgatcttcctgatccaccgttcatcctgagcggctctcgttctccatcctggaggtgtccattacgcgatcctgcgttatccttgcttcatcctgaagcctgtccctgcaacgccgtcctggcgggtcctgcagaagcgccatcatcctgatgttcgcttcatttcgcgacgtcctgtcgacagacataggatcactgattctgccccttcttacaacccttcttgagacaatctcttaagattagtccccactcaaaaggacgaaaaaattaagatctgatttaataccaacaacttatataaaaaagtatggattaaatttaccttaaatgatgacgatctcttacaggttttgtaagagatctctcacaaacgatctggcagactggattacagaactggctcaaggtggttgaggaaacccgcaagtgagggagaaagcgtaatgcgtttggcggtgccgagggtctctttgactacctcgccgctgagattacagacggatatcacatccagttcactctcgagggtggcgataaacagcgtcggcgacagcttcaaccgcttctgcaccaccaggtgcccgattaaattttcctgcacccgctggaaatcctcttcactccaggtctgcagcagcgtcaaggtttcgccggcaaaccggccggacatatcgccggcaaactgagtggtataataagaatgaagcggctgttgtaccacaatgtcgagggcgcgttcaaccgcgctgatattttgcgccagcgaaaacggctgcggctgccagaaaacggcctcgccctgggtgtcgacaacgcaaggcgacgggacgccgtaaagctcttcactgcgcggcaggctgtggcgctgctgctgccagacggcgcaatatcgttgggtaaaagcgcgtagcgcttctgctgtctgatggtccaccggtttctctcttcacgttagacaggatacactggagcaatagtgtacccgctttactatggtgaaacatgtcttcttacgataatcatcaggcgctggccggcctgacgctcggtaaatcaaccgattaccgcgatacctatgacgcctcgctgctgcagggcgtgccgcgcagtttaaaccgcgacccgctgggcctgcatgccgataatctgccgtttcacggcgccgatatctggacgctgtacgaactctcctggctgaacggcaaaggtctgccgcaggtggctgtcggccacgtcgagctgcccgataccagcctcaatctggtggagtcgaaaagctttaagctctatctcaacagctttaaccagacccgtttcgctagctggcaggacgttgcagagacgctgactcgcgatctcagcgcctgcgcgcaggggaaggtgaaggtatcgctctaccgcctggatgaactggaaggccagccgattgcccgcctgcacggcacctgcatcgacgatcaggatatcgagatcgataactatcagttcagcgccgattacctgcagggcgccgccagcggcaaaatcgtggaggagacgctggtcagccacctgctgaagtctaattgccttatcactcatcagccggactggggctcggtgcagatccagtatcggggggcgaaaatcgaccgcgagcagctcctgcgctatctggtttcgttccgccaccataacgaattccatgagcagtgcgtcgaacgtatctttaacgatattctccgtttctgccagccggaatcgctttccgtttacgcccgctatacgcggcgcggcggtctggatatcaacccctggcgcagcaatggcgacttttcccccgccaccggccgcctcgcccgtcaataataaacaatttcacaatttgcgtgcgtttaggcgcgcgcaaggttgtggaaacgccgttcgcagggctattgtaatcacaggaagaccataagcgtcctgtaaggagttcacttgattacacatgttagcccgcttggttcaatggatatgctgtcgcagctggaagtggatatgcttaagcgcaccgccagcagcgacctgtaccaactctttcgcaactgctcgcttgctgtgctcaattcggggagcctgaccgataacagcaaggagctcctgtcccgtttcgaaaatttcgagattaacgtgctgcggcgcgaacgcggcgtgaagctggaactgatcaacccgccggaagacgccttcgttgacgggcggattatccgctccctgcaggccaacctgttcgccgtgctgcgcgatatcctgttcgtttacggccagatccacaataccgttcgcttcccgaacctcgatctcgaaagttcggttcatatcactaacctggtgttctcgatcctgcgcaacgcccgcgcgctgcacgtcggcgaggcgccgaacatgatcgtctgctggggcggccactccatcaacgaaaacgaatatctctacgcccgccgcgtcggtacgcagctgggcctgcgggaactgaatatctgcaccggctgcgggcctggcgcaatggaggcgccgatgaaaggcgccgccgtcggccatgcgcagcagcgctacaaagacagccgctttatcggcatgaccgaaccatccattatcgctgcggaaccaccgaacccgctggtcaatgaactgatcatcatgccggatatcgaaaagcgtctggaggccttcgtacgtatcgcccacgggatcattattttcccgggcggcgtcggcactgccgaagagctgctctacctgctgggtattctgatgcaccccgacaacaaagcgcaggtgctgccgctgatcctcaccgggccgaaggagagcgccgactacttccgcgtactggacgagtttatcacccataccctgggcgaatcggcccgtcgccactaccggatcatcattgacgacccggcggaagtggcgcggcagatgaaaaaagcgatgccgctggtgaaagagagccgtcgcgagaccgatgacgcctatagctttaactggtcgattcgcatctcgccggacctgcagatgccgtttgatccgacccacgagaacatggccaacctcaaactctccccggatcagccggtggaagtgctggccgccgacctgcgtcgcgccttctccgggattgtcgcggggaacgtcaaagaggtgggcatccaggccattgagcagtacggtccttacaaactgcacggcgatccggagatgatgcgccgtatggacgatctgctgcagggcttcgtcgcccagcaccgcatgaagcttccgggcggcaccgcctatattccttgctacgaaatcatcgcctgatttccccctctcccgccggggcatcgcctgacgcctgcccccggcgggctctcttcctctgacttccagaacgcgctaaaaacctttctgttactaatcaatcacctgaattatttctacatagccaaacgtttgcgttggtaaaaactgcgacaattatcactgcaaaaaatggttttaagcgcaaaaacgtcgactagttctcttttttacagtaaatccctcgttattacgccgctccgcttttatctcatatgctgcaaatggtagccttcgcgccacaaatcgctggctgatcaccagaaacaggctgttggactaaaaatacgcacattgaaagtggattattgcatttgagatcgcgatcactgatgcataaaccatataaatgtatctttccggcccaattattacggagaaaatttctaaaaaaaccgtaattaaacgaatttcatgttacgcaattgtatttattcattagattttgttgattcctccaggagatacagatggaaaccactcaaaccagcaccatcgtttcgggcgaaacccgcagcggatggcgtaaaaccgacaccatgtggatgctgggcctgtacggcacggcgattggcgcaggcgtcttgttcctgccgatcaacgccggcgttggcggcatgatccccctgatcatcatggcgattctggccttcccgatgactttcttcgcccaccgcggcatgacccgcttcgtgctctccgggaaaaacccgggcgaagacatcaccgaagtagtggaagaacacttcggcgtaggcgcaggtaagctgattaccctgctttatttcttcgctatctacccgatcctgctggtttacagcgtggcgatcactaacaccgtcgaaaccttcatggcgcatcagctgcacatgacgccgccgccgcgcgccattctgtcgctgatcctgatcgtcggcatgatgaccattgtgcgtttcggcgagcagatgattgtgaaagcgatgagcgtgctggtgttcccattcgttatcgcgctgatggtgctggctctgtatctgatcccgcagtggaacggcgcggcgctggagacgctctccctgagcggcgcttccgttaccggcaacggcctgctgatgaccctgtggctggcgatcccggtgatggtcttctccttcaaccactcgccgatcatctcttccttcgcggtagccaaacgtgaagagtacggcgaaggcgctgagaagaaatgctccagtatcctcgcgcgcgcccacatcatgatggtgctgaccgtgatgttcttcgtcttcagctgcgttctgagcctctctccggcagacctggcggcggcgaaagagcagaacatctcgattctgtcttacctggcgaaccactttaacgcgccaatcattgcctggatggcgccgatcatcgcgatgatcgccatcaccaaatccttccttggccactatctgggcgctcgcgaaggctttaacggcatggtgatcaaatccctgcgcagtaaaggcaaatcgattgaaatcaacaaactgaacaagctgaccgcgctgttcatgctgatcaccacctggattgtggcaaccctgaacccgagcatcctcggtatgatcgagacccttggcggcccgattatcgcgatgatcctgttcctgatgccgatgtacgcgattcagaaagtcccggcgatgcgtaaatacagcggccatatcagcaacgtcttcgtggtgattatgggcctgattgccatctccgcgatcttctactctctgttcagctaattcattcaacgcctccccccgcgccgctttacggcggcgcgctttccgacagcacgggaatacatatgatcagcgtattcgatatctttaaaatcggcattggcccttccagctcccataccgttggaccgatgaaagcgggcaaacaattcactgacgacctgatcgcgcgcggcctgctggccgaggtgagcaaagtcgtcgtcgacgtctacggctccctctccctgaccggtaaaggccaccataccgatatcgcgattatcatgggactcgccggcaacctgccggacaccgtcgacatcgacgccattccgggctttattcaggacgttaatacccatggccgcctgatgctggccaacggtcagcacgaagtggacttcccggtggatcagtgcatgaatttccatgccgacaacctgtcgctgcatgagaacggcatgcgtatcaccgccctggccggcgacaaggtgctctacagccagacgtattactctatcggcggcggctttatcgttgatgaggagcacttcggccagactaccgaggcgccggttgccgttccttacccttacaaaaacgccgccgacctgcagcgtcactgccgtgaaaccgggctgtcgctctccggcctgatgatgcagaacgaactggcgctgcacagcaaagaagcccttgagcaacacttcgccgcggtgtgggaagtgatgagcgccggtatcgagcgcggcatcaccaccgaaggcgtcctgccgggcaaactgcgcgtcccgcgccgcgccgccgcgctgcgccgtatgctggtgagccaggacaccaccaacagcgatccgatggcggtggtcgactggatcaatatgttcgccctggcggtgaacgaagagaacgccgccggcggccgggtggtgaccgcgccaaccaacggcgcctgcggtatcgtgccggcggtgctggcctactacgacaagtttatccgcaaggtgaacagcaactccctggcccgctatatgctggtcgccagcgcgattggttcgctgtataagatgaacgcctccatctccggcgccgaagtcggctgccagggtgaagtgggggtcgcctgctcgatggcggcggccggtctggcggaactgctgggcggcagcccgggtcaggtgtgcatcgcggcagagatcgctatggagcataacctcggcctgacctgcgacccggtcgccggccaggtgcaggtgccgtgcatcgaacgcaacgctatcgctgccgtgaaagcggtcaacgccgcgcgaatggcgctgcgccggaccagcgagccgcgcgtgtgtctcgataaagtgatcgagaccatgtacgaaaccggcaaagacatgaacgccaagtaccgggaaacctcccgcggtggtctggcgatgaagattgttgcctgcgattaacctgctggcccgccacgcgtcggcgtgtcgggccatcgtcctgcataactctttttgttatatcaataaaattttagttatttaatggttataagcgctgtttgttaccttacgcaaaaccgctaaggagaacagacaatgtccaaccgattccgccccgcctggctgctggtcctcgccgccctctctacctccgcgctggccaaagcgccggaaaccgtcaacatcggctatcaaaaggcgaatatcttcgcgctgctgaagtaccgcggcacgctggatgagagcctgaaaaaacagggcattgccgtacgctgggtcgaattccccgccgggccgcaaatgctggaggggctgaacgtcggtagtatcgatctggccgcaaccggcgatgcgcctccggcctttgcccaggcggcgcaagccgatctggtctaccttgcccactcccccgctaacccgaaaacggaagcgattgtggtgcctgaacagtcggcaatccacagcgtggccgacctgaagggcaagcgcgtggggttgaacaaggggtctgacgtcaactacctgctggttgccgcactggaaaaagcgggcctcagctataaagacatcaccccggtctatctgccgccggcggacgcccgcgccgctttccagcgcggggcgattgatgcgtgggtgatctgggatccgttcctcgcagaagtggaaaccaacgcgaaagcccgacagatccgcaatgccgaggggctggtgccgcactacaccttctatctcgccagccgcaagtttgcagatacctacccggagacagcaaagcaggtggtggatgagctgggtaaactcagcgcgtgggcgaacagccatcaggacgaggccgccgggctgctgtcgacctcaaccggactggataaagccatctggctgaagaccctggcccgcctgccctacggtgccgaacgcatgaccccggcggtgtataacgaacagcaggcgctggcggatacctttacgcgcatcggcctgctgccggtgaaagtcgacgtgcgcagcgccacctggtcgctggataaaccttgattttcctgacgacgggaagcactgcgcctcccgtcgccgacaggcttaccccgccgttttctcaccattgcctatctgccagataaaggtgggcgcttcaccgttcaccagccagttaccgatattacgtgccttataaatcaccggattatgcgaggcaaccgtccgcgcattgcgccagtggcgatccagcgcaaggcgagttcgcgtatccgacgccccgagggcattaaacagctccgtcgccgcccgcgggatccagtcgctggcgatcacctgcgcctgcgccgcttccacttccgccagctggttacgccgggcaatcaatgcttcgtcgtcgctgacgtgcgccacataggcctgctgcagcgattccgcggcctgcaggaccgcggcccgggtcgcccatgcccagctgctgatctgcccaacgacctgcagaacctgggcgtcatcgcgcggcacggcggcgttgccgtggctgtacatccgggagcgatgtttgacgccctgcgcggcatcccgctcaaccgccaggccaatgcccgcgagggtcgccagcagcacatgctggtagaaggcggtctgatagcgaaagcgctgggcaaaatcatagacatgttcggtttccacccgagcgccggtaaagcgggtggtcccgctgccggtcaaccgctggccaaagccatcccagtcatcttcccgcaccacgccggtctgctgggtgctgaccagggctatcacatcgctggcggtatcactgcgccgggcaaacacatcgatccagtcggcgtacagcgcgccggtgctgtaaaacttctcgccgtcgagtcgccagccgccctctgtcggcgtcactctggtgttcacctctcccagcttaaccgcgccgatctccgtccagccgctgcccaccagctcaccgtcgaggaagcgacgaaaccagcggtcgcgcccggcggaatccggctgattcagctgatcttccacaaaggcaaagtgcgcgcgcagggcctgcggcaggttagagtccgcttgcgccagctcgatcagcagcgcgctgagctgcggcagcgaagcgccccagccgcccttctcgcgcgggatacgcagcgtgccgaagcccgcttctttcagccagcggatcggctcatcgggcagaatgcgctgctgttcgcgctccgcagcgccctgggcgatacgggtgaatatcgggcggaaggcggccgccagcgcgtcataatcggtgccagtagagagcagggtcattgtcagttccttattcatgaagtgcgtcgatatcttctcgcgtcggttcatgacggaccgccagcaggaagaaaatgggaataatggcggcaagcgagaccacccagaacatctgcgtgccgagggaggcctgcagcagcggcagaataaacaacgccagcgcgctgccgatcccggagagtgcccggctgaaaccgaccccggtggcgcgaatggcagtaggataggagagcgccgggtagatcatcagctgcgcccccgggccaaacccttcggcgaacagccacagccccagcatcgcgatagccagcacgatacctgccgtcgcgtgcggttgccccaccagcgccagcacaatcagcgccacaaactgcagggcgaagccggctatcgccacatgacgcgaaggatatttccacgccagatgcataccgagcagcccaccggtaaaagcaaacagggcgttcagccccagcgatgccgaaatagtttcgaagacgccagccccgaggaactgggcaagaattgacggcaggaaaaaggcaatcgccgtgtactcgaaggagatacagatattcatcaccccggcgacgatagtccgctcgcggtagggtttttcgaacagcacgcggaagctcactttcgacgctggcgcgggcttcgccgccgggacctcatgggcatggatcccccaggagtcgcgtaaaatacgcactgcagaggtcagatcgccctggttcgccgcccacagcggggattcattcataaatcgactgcggacggcaataatcagcagtgccggcacggcgccgaacagcagggaggcgcgccatagccagtcaagatgctcctgcggcagcaggaaatagaggccgaagataatgagaaagcagacggttgaggcggcgtaccacatcgggcaccacgccgcgaggcgagccgctttgttgcctttgccggcaaagcgggaaaactcggccagataggacatcgctaccggcaggtcgatgccaacgccgatgcccatcaggaagcgggcgccaatcaacacccagacgttcggcgccagcccggcggcgatagccgaaatcacgaaaaagaacatatcggccataaaaaccgaatagcgaccatatttatcggtcagccagccgccgataatattgccgacgatagtcccgaccataatggacgaagtcaccaggccggtcagcagcggtgagagctgaaattcacgtacaacgtcatcaataccgtaggagagcgtggttaagtcatatgcgtcgagaaaaacgccccccagcgcgaggaagacaatcatccgcgcatatttcgcttgttccttgccggaattaattagacgcgccacatccccgacgctactgaccggtaccgaagcgataccgggattatccactggtaatgtactcattttttcaccttattattttgtgcaggtcatcagcggttatagaccgcgcgcgacgagaatcaaaacaacaaatcattctataaaaatcaatataatcaataagttaataaatatcaccagcacaaaaaggacgcgttttcacgcatcctcaagggaaataaataacaacgaaaatagacgtcgtgcaggacgcttattccgcggacactggaactaatacgtcttttaccagcgggtcatcggtggtttttaaccacgtctggatccgcgggtcagaaaaagcctgttttaatttgacgatattttcctgcgataaatacggtgtaccaatcactaattgcgaagcaaaggtgcgcggcgccggcgggaataatatgcctttctcacgcggcactttcccggcgtcaaattgcgagacatagccgatggcggcatccaccgaatttaacgcccgcggtatggtcagcagatccagctctttaaagacaaactgatgcgggttaccgacaatatttttcagcttcgccgtgcgcggctccaccgccgggtcgagcgagatcaacccaatgcgctggagcagccacagggcctgcccctgattggcgccatcgtcaggcacgacaatggtcgcgccgttgggcaacgcctgtaccgacgagtagcggtcggaatagatgccaaacgcccactggaacaccggcaccgtggtcgacagcgcaaagccgttagcgtccaccacctgtttaagccaccactgatgctgatagatcgtcccggcatactgaccttccgctaccgcgcggtcagcctggaccggatcctgcactcccaccgcctccagtttcagaccgtaatcgggcgcaatatgctgattaatatactcaatgatccgctgctcgccggccatcgccggctcgtagtgaatttttaacgtgctgccgaagaccacctgctggctttgggtatgtccccgccaccaccagaaggcgatggcgagcaggataatcaccgccagcgccgccagccagggccagcgccgcgctttacgtaactcaaattgctctgttgtcatacaaggttcccctgcgtgtggcgtaaacggttgaccagacggtcacccaaaaattgaatcaactggatcgtggcgatcagggcaacgatcgtcgcgatcatgatgtggttgtcgaagcgctgatagccgtacaccacggccaggtagccgatgccgccggcgccgatggtcccggcgatagccgaatactcgatcatcgagaccaggtttagcgtcaccgccgccgccagcgcgggcatggcttcactgagctgcgcgctggcaatgatttgccagcgcgacccgccgcagacgacccccaccgcggtgacctccgccggcaactcgcgcagcgcgttctccaccagacggccaaagaacgggacgccggcggcgatcatcggcactaccgcggcggggatgccaatcgtggtgccggtcagccagtaagtgaacgggataatggcggccatcagcaccagaaacggcagcgaacgtcccatattgaccacccagttcagcagccggtacagcagtgcgtgcggaaataagccccgcggcgaggcgttaaacaacaccacccccaccagcccccccagcgtgacgacaaacagcatcacaatggccaccatcagccaggtttcgccataggcggggagcagcagcgaagggatttcgccccagggggtatcctgactgatgactgtcggtttcataccgcctccctgagcaacggcgcgctgtcgaggatctccgccgttatgccgagctgcgccagcaggccctgcagtcgcgcgggcgacaggcgttcgccctgaaagcgcactccggcctgcaggcgaccggccagccgaccattaatcacctcgacgtgaccgccaaggagatcgatctgcagcccccactgctggctcaggcggctgatccagtcggtggccaccggcacatcccagcggtagctcagacgcagcagcagatcgctatgggtagctgccgccggcgtcagcggcaacagctgctggccgagcagagaatcgggacgcgccagcagatcttcgatccgcccgtactggacgatcgtcccgtcgcggatctccgccaccgcatccgccgccgtgcgcaccgcgtccatttcatgggtaatcaggacgatcgccagctggtactcatcacgcagccgcttgagcagagccagcaccgaggccgtggcctgaggatcgaggccggaggtggcttcatccgccagcagaacggacgggcgcacgccagcgcgcgggcaatgccgatccgctggcgctggccgcctgagagctgggccggccaggcatccgctttgtggctcaggccgacgctctccagcagctcgccaacccgcgccttgatatcgcgctccaccacaccaagccacgccagcggcagggcgacattctcccaggcggtcctgcggctcaacagcgccgaagactggaaaacggtgccaatcgcccgccgttcccggcgcagcgcctcgccggacagcgccgacagatccttgccattgatacgaatgctgccgctgtccggttgctccagcaggctgatgcagcgcgccagggttgatttaccggcgccgctcggccccaccaccgcggtgatggagcgctcaggcacctgcagcgacagccctttcagcaccgcgctgagccggccatccgccgtgcggtaacttttatgcaggtcatcaatagcgatcatgtcaccttctcctctaccgatgccgccgtgcgcgcatcgcggcggtagctggcgcccgggtgaggcgcggccagacgcgggccgccgccgaacagtttttcgcgcagggtcccctcgcggtactcttgcttaaagacgccgcgcttttgcagctcaggcaccagcagctcgacgacatcgcggaaggtttcgtgagtgacggcataggcgaggttaaagccatcgacgtccgtctcttcgacccaggactgcagttcgtccgccacggtttgcgcgctgccaaccaccagcggaccgaagccgccgatccccgcccaatcggccagggcctgcaccgtccactggcggttcggatcagcggtcgaaaaggcctccaccgccgactgaatggcgttggtgtgcagatacttcagcacctgatccggctgatactggccgaaatcgatccccgtccagccggagagcagcgccagcgcgccttcatagctgacgtactgcttatattcctgccacttcgcctgtgcctcgcggtcggtgtcgccgacaattaccgtctgcaggttgaagatcaggatgctgtgcggatcgcgccccgcctcagctgcccggcggcgaatatccgccaccgtcttcttcagcagcaccttcgacggcgctgcgacgaagacgcattcggcatggccggcggcgaactgtttgccgcggctggacgcccccgcctgatacagcaccggcgtgcgctgcggggatggctcgcagaggtggatccccggcacggaaaagaactgtccctgatggttaatgggatggattttccgcggatcgctgaagatcttccgctctctgtcgcgcagcaccgccccgtcctcccagcttccctccagcagtttgtagatcacctgcaaatactcatcggcatagtcatagcgggtgtcatggtcggtctgggtctgctggccgatattgcgcgccccgctctccagataggaggtgacgatattccagcccacccgccctttggtcagatgatcgagcgtcgacagacgacgagcgaaggggtaaggatgctcaaacgacagcgaggcggtcaggccgaagcccagatgctccgtcaccagcgccattggggtgatcagagccagcggatcgttgaccggaacctgcgtcgcctggcggatcgccgcatcgccgctgccgttcagcacgtcatagatccccagcacgtcggcgataaacagcccgtcgaacttgccgcgctccagcagccgcgccagatccacccagtactccagatctttatactgccaggagcgatcccggggatgcgcccacaggcccggcgactgatggccgacgcagttcatatcgaaagcgttaagacgaatttcacgttgtgatgacatagcaatctccatagcgcggcccgtcgccggggcgcacgcggcaaaatgaatcagggaaaagaaagagaggtattcagtacgcaggacatcgggagtcctgcgggatcccgagcgtgagtaacgcttgcgccgccacgtcagcggcatggtcggctacctgcggcaggcccatcagttcgccaaaacgcccgcgggcggccggaccggccaccagcaccggcagcgcctcaacgtgcggctcagccactgcccgggaacggctgtccacctccaggcccatgccgagggcatcggcgcgaatcaggccgcggcgggcgaggtcctgtaaaaatggctggctgtcggtcagggcgcggtgtgcgggtccggtggtcaggatcaggtgatcgacgctcagcgtctgcacgccgccgccgcgccgcgccagcgtcagacgcagcgtttcgccttcaccgcttatcgacagtagcctggccgcctgcacctgcagactgcccgtgcgctggcgcgcctccagcacctcggcgacctgcggcgccacgcggtagcggtggacatcccagtaatggcgcagatgacgcagaaaacgctggcgatcggcgacgctgagcgcctgccagatccgctgcccctgttgacgaaccgcatccagcaccacctgccagctcaggccctgctgcgccgcatacgcgacgtcgaggcggatctgacgcaggcgctgacgcagactgccctgctgatagtcgccaggccaggttgtccccgcgccgctcaggttgccgcgcgacagcaggccgtggcgcgaaaaggcgacgatactgccgcggtggcccagccggtccagcgtcacgaccgtatcggccatggttaatccggtgcccatcaccgccacccgggcgtgcggggcgatggcatcgagcgcgccgggctgccacgggttggcaatcagcgccggatgatgacgccaggcttcggcctgcggcggcagcgaaggcggtggatgactgatcgccagcaccagcagatcggccttaaactgcaggccgccgtcggtggtcaccgtcccctgatgaaaagcgagcgcccgatcgcgcaggtggcgaagccgtccgccgctggacgccgcggcgtcggcaaaacgctgcgccacatagcgaccaaactggccgcgctgagggtagacggaaccgtccgggcgcagcgcctgcacatcgacggcaaaggcaggctgatggcggtaccaatgatcgaaggcgccctcttcgtcgccggccagctgcatgcgagcggccggaacgttaatccggtgcgtcggctccgcagtggagtaggccaccccggccccgggggactggcgcggctccagcagcgtcacgcgcaccccgttcggcgccaggcgcagcagctcaatcgccaccgccgcgccgctaaagccgccgccgataatcacgatatgcggttctgcactcatcgctgccctcctccggtatgctgtctcatggtcgcgctccgggccatcagctggcgctgacctgacgcaccgggcgcttatcgccgccgatggtttcgccaaacggaccggtgttcacgctacgcgccttcgacgaggccccgttttccagcggcaacagaggcatcaccagctcagcaaagcggtgcgcttcttccagatgtgggtaaccggagaagataaagttgctgatgccgagcgcctgatattcgcggatgcgttccgctacctgctgcggattacctaccagcgcggtacccgcgccgccgcgcaccagtccgacgccggcccacagattgggcgcaatgcgcagattatcgcgcgatccctgatgcagggcgctcatccgcgcctggccggccgagtccatgcgggcgaagatcttttgcgcctgggcaatggtatcgtcgtcaagatgggcgatcagccggtcggcggcggcccatgcctcttcttccgtttcgcgcacaatgacgtgcagacgaatgccgtactgcaggatgcgtccgcgggccgcggcgcgctcgcgcaccaccgccagcttctccgccaccagttccgggggttcgccccacgtcagatagctgtcgatctgctcggccgccacatcaatggccgcatcagaagagccgccgaaatagagcggcgggccattctcctgcaccggcgggaacaacacctcagcgccttccacgtgaatatgctcgccgtgataatccactttttccccgcgcagcaggcgggtgtaaatatcaagaaattcgcgggtcacctgatagcgctcgctgtggctgaggaagataccgtcgcctttgttttccaccgggtcgccgccggtaacgacgttgatcagcagccgaccttccgataaacggtcgagggtggccgccatccgcgccgccagggttggcggctgcaggcccggtctgaccgccaccagatagcgcagacggcgggtcaacggcgccagcgccgaggccaccagccacgaatcttcacagcttttaccggtggggatcagcacgccgtagtagcccaggctgtcggctgccagcgccacctgctgcagataaggtaaatcgaccgggcgtccaccctcggtggtacccagataacggccatcgccgtgggtaggtaagaaccagaagacattgatcttgtcgggagcttgctgcgtcattatctatttcctatataaccatatccgatatttatcgaagagatgttttaatttggttatatgggtgttagcgataatcatgccaatggtgaataaaaaattaatcttttaaaatcaatgcactgaaaacggcttcgccgcgccgcgctgttgcaaatcgcgcagccgccgcgcatccgctggcgcatttgcaacagccgcgggccttccccctctggtttctgcggccgccgcaggataagttcagagcgtcaacgatcggaggcccgctatgctgaacccagaatccccttccaccgctcccgcgctgatcgacccggcgtcgaaggccttccagagcctgctggacaaactcgcgccaacggaggcgaccgtgctgatcgtgggcgaaaccggcaccggcaaggaggtggtggcccgctatctccatcatcacagcgcccgtcgccagcagccgtttctggccgttaactgcggcgcgctgaccgagagcctcgccgaagccgaactgttcggccatgagaaaggcgccttcaccggcgcgcagcagggacagcccggctggtttgaagccgcggaaggggggacgctgctgctggacgagatcggcgaattaagcctgccgctgcaggtcaagctgctgcgagtgctgcaggagcgtgaaattacccgcgtcggctcacgcaaagcgattaaagtgaatgtccgggtgattgccgccacccacgttgacctggcccaggcgatccgcgagcgccgctttcgcgaggatctctactatcgactgaatatcgcggtggtgccgctgccgccgctgcgccagcgtcggcaggatatcccgctgctggcgcaccactttttatcactctacgcccggcgcctcgggcggccaaccctgcatctggcgccggaatcactggcccggctgatggactattcgtggccgggcaatattcgcgagctggaaaacaccctgcacaacgcggtgctgctcagtaaagaagaggagatcagtcctgcccagctgcgcctggcgacgctcaacgacgccccggggccggcgagcgatcatgaactggacgactttattcgccaccagctggcgcttcccggcgagccgctgtggcagcgagtgaccagcgccctgattcgccacgccatggcacattgcgacgataaccagagccaggcggccgcgctgttggggatcagccggcataccttgcgcacccagctcgctaacctcgggctgatcaaaagccgccgccgcccgcctgcgccgccgcgggcgttcgccaacgcagccggggccgatcgcgaactgcgcattggctaccagcgcttcggcagcctcgggatcctgaaagcccgtcagagcctggaaaccgccttcgccagcctcggcgtcaacgtgctgtggagtgagtttcctgccggaccgcagctcctccacgccctcgcctgcaacgagatcgacttcggcaccaccggagaagcgccgccggtgtttgcccaggccagcaatagcgaactgatgtacgtggcgtgggagccgccggcgccgcgcagcgtggcgatggtcgtcccgcaggggagcgacattcgccagctcagcgatctgcgcggtaaacgcatcgccctcaataaagggtcgaatgtccactggctgctgctgcagatcctcgaggacgccggcctgggtctgaacgatgtgcgggtggtctataccccgccgaaatatccgctgaccgccagcgactatctggcggttgacgcctggatgatgtgggatccgctgctcagcgacgccgaacacaccggcgagctgcgggtggtcgccagcggcgaaggacgggtcaacaaccatcagttttatctctcgcgacgggactatctcgctcagcacggcgatatcatgcgccgcctgctgacggagctgacccacaccgggcagtttatcgactcgcatcgtggcgaagcggcccgcttactctcggcagagctggggattgacgcccggtcgctgcgcatcgccctcgcccgccgaagccaccgcccaaggccgatggatctgtcagtgatccgcgcccagcagaccatcgccgatcgcttttacgccctcgggcttatcaccaaaccggtcccggtgcgcgaagcggtgtggtacggcgagcccgcgcccggcgtcgccagctcgctgatggcggtcagttagcgaaaattgcgcgttatcttcctgattgttcaggcgcagatagcctcgatctgatggcgatgttaccctaaagacgctgagaataagggggtatctgtggctgttcatctgttaatcgtcgacgcgttaaatctgatccgccgcatccacgcggtgcagggttcaccctgcgtcgatacctgcctgcatgccctggagcagctgatcgtccacagtcagcccacccacgcggtggcggtgttcgatgatgaggatcgcgcccacggctggcgccaccagcgcctgccggagtacaaagccggccgcgcgccgatgccggagacgctggtggccgagatgccggcgctgcgggccgccttcgaacagcgggggatccgctgctgggcctcgccgggcagcgaagcagacgatctcgccgccaccctggcggtgaaggtggcccaggcgggccatcaggccaccatcgtctccaccgacaaaggctactgccagctgctgtcgcccaccatccgcatccgcgactactttcagaagcgctggctggacgcccccttcatcgccagcgagttcggcgtcaccccggagcagctggcggattactgggggctggcggggatcagcagctcgaaggtgccgggcgtggcgggcattggacccaaaagcgccgcccagctgctgaacgagtttcaggacctggaggggctgtacgcccgtctggccgaggtcccggagaagtggcgcaaaaagctggccgcgcatcaggagatggccttcacctgccgggaggtggcccgcctgcagaccgacctccagctggacggcaatctgcagcagctgcggctgacgcgctgaccatcgttaagaggtgcgccggtgcagggtaactgcctgctttacccgggacaggcaatcaccaggccgcctgatataacccgacgatatccgccaggctcgcctcgcgcgggttgccgccggtacacacatccgccagcgccgcctgggccagcgccggaatatcctctttcctgacgcccacctcgcgcagatggccgggaataacgacatcgcggttaagctggcagaccgcctctactgccgcctcgcgcgcggcggtcaggcttaacgcttccaccctgacgcccatcgcccgggcgatgtcgcgatatttttccccggtcgcctcagcattaaagcgcatcacgtgcggcagcaggatggcattcgccacgccgtgcggcgtgttgtaaaaagcgccgagcggatgcgccatgccgtgcaccagcccgagcccgacgttggaaaatcccatccccgccacatactggccgagcgccatagcttcccccgcgcctgcgtcgccggcaaccgagccgcgcagcgcgccggcgatgatctcgatggccttgaggtgcagagcatcggtcaaagcccaggcgccgcgagtgaggtacccttcgatagcatgcgtcagggcgtccacgccggtagccgccttcagcgccggcggcatagcgtccatcatatcggcatcgataaaggccacctgcggaatatcgtgcgggtcgacacagacgaatttgcgccgctgttcttcatcagtgatgacatagttaatcgtcacctccgccgcggtacccgcggtggtcggcaccgcgaagatcggcacgctgggctgacgggtgggcgacagcccctcgaggctacggacatcagcgaattccgggttacgctgaataataccgatcgccttacaggtatcctgcggcgaaccgccgccgatggcgatcaggtaatccgccccgctgcgttgaaaggcctgcagcccctgctggaccacggcgatggtcgggttagggatcacgtcgctgaacatatcccatgccagcccggcggcatccagtttgtcggtgactttcgccgccacgccgcagcgggcgagagtgctgtcggtgacgatcaatgctttacgatagccgcgccgcaccgcttcatcggttaatgcgtttatcgccccccggccaaaccatgccgtttcattgaggatcattctgtttgccatcgtggctctcctgttagcgttgcggcatcactcttcaatgcgtaatccgtaggttttgaacttctccagcacgatggcgatcgcctcgtcatccagcaccgggaccgggtcggtaatcgccagcgtactgaggtagagctgggccaggacctccacttcatgcgccagccagagcgctttctccaggctggcctcgcaggcgatcaggccgtgatgctgcagcagcgtggctttgcggtgcttcagcgccaccgcgacatgctcagacagttcgcgggtgccgaaggtggcatagggcgcgcaggggatcgaattcccgccggccgcggcgatcatatagtggatggccgggatgggccggttgaggatcgacaccgccgtacaatggacagcgtgattgtggaccaccgcctgggcatcgggtcgcgtctggtaggccgcctgatgaaaacgccattcgctggagggcagttttccctgctcatgctggccgtcggcatcaataaagacgatcttgtcttccgtcagcttttcatatgggataccggtaggggtgatcagcattcctccctgatagcgcacgctgacattgccggcggtcccctgatttaaccccaggcgggtcatttccaggcaggtatcgataatctgccgggccagtctgtttctttccattgcgttcctcttttggtgactcatcatccatcaacggcagggcaacagaaatatcgtcggctaccgtgggatagggtgaataatggtcttcatcatcaacctgaatattcaaaggggaattttcatgattattttttgtgagccgcgtcaattattccgccatgaataaagcaaccatacccattacgagagagattaaaatgcccgttcttaataatatttcatcaagcgggcattttatttctttgtaacatttgcccgttttccacgatatatattcattcggtcattagcgttgtggttttgtgaatttattttctcaaacggtcagcgtttttgaaaaattaaagtgacaataatcacataaaatggcccacagtacgttaagtgtgaccatcatcatattaacagacggtttttatttgaaaatgaagccatgagttccgccgtgactttcatttcactcaccggcgcgtcacctgagctcacttaattttgcagtctgctgcagcaccagactgcgccctgaatgctgttgtaaatgcttctgaactgatgaggacgctatgggaaacacaacgataccaacgcaaagttaccgcgccatggagagcgggcagagtaagagctacattattcctttcgctctgctgtgctccctcttttttctgtgggcggtggctaataatctgaatgatattttattgccgcaatttcaacaggcctttaccctgactaacttccaggccggattaattcaatcggccttttactttggctattttattattcccatccccgccgggatgttgatgaaaaaattcagctacaaagccggcatccttacgggtctgtttttatatgcctgcggcgccgcgctgttctggcctgccgccgaagtgatgaattacaccttatttctcattggattatttattatcgctgccgggcttggctgtctggaaaccgcggccaacccgtttgtcaccgtcctcggtccggaaagcggcggtcacttccgccttaatctggcccagacctttaactcattcggcgccattattgccgtggtatttggccagagtcttattttgtctaacgtcccgcatcagccgcaggaggtgctggataaaatgacgccggaacagctcagcgcctggaagcacagtctggtcctgtcggtacaaaccccctatatgattatcgtggccattgtcctgctggtcgccctgctgatcgtctgcacccgcttcccctccctgcaaagcgatgaccacagcgacagcgcgcagagcacttttttcgcctcgctgacgcgcctgatgcgcatccgccactggcgctgggcggtactggcccagttctgctacgtcggcgcgcaaaccgcctgctggagctacctgattcgctacgctatcgaagagatcccgggcatgacggccggtttcgccgccaactacctgaccgccaccatggtctgcttctttatcggccgttttaccggcacctggcttatccgccgcttcgcgccgcacaacgtgctcgctatctatgcgtttatcgccatgctgctctgtttgctctccgccttcagcggcggccacgtcggtctgctggccctgaccctgtgcagcgcctttatgtccattcagtacccgaccatcttctcgctggggattaagcatctgggccaggacaccaaatatggctcgtcatttatcgtcatgaccattatcggcggcgggatcgttaccccggtgatgggctttgtcagcgacgccgccggcaatatcccgaccgccgaactggtcccggcgctgtgcttcgccatcatctttatttttgcccgtttccgttcacaagcggcgacgaactaaacctgttatccgcataacctgagggatctgtaatgaaaaaaatcagcttaccgaagatcggtattcgtccggtaatcgatggtcgtcgcatgggggtccgcgagtcgctggaagcgcaaaccatgaacatggcgaaagccaccgccgcgcttatcagcgagaaactgcgccacgcctgcggcgcccgggtggagtgcgtgattgccgatacctgcatcgccggcatggccgagtcggccgcctgtgaagagaaattcagcagccagaacgtcggcgtcaccatcaccgtcaccccctgctggtgctacggcagcgaaaccatcgacatggatccgctgcgcccgaaggccatctggggctttaacggcaccgagcgtccgggggcggtctatctggccgcggcgctggcggcccatagccagaaagggatcccggcgttctccatctacggacatgacgtgcaggatgccgatgacacctcgatcccagcggatgtcgaagaaaagctgttgcgcttcgctcgcgccggcctggctgtcgccagtatgaaagggaaaagctatctgtcgctgggcggcgtctcaatgggcatcgccggatctatcgtcgaccacaacttttttgagtcctggctcggcatgaaggtgcaggctgtcgacatgacggagctgcgccggcgaatcgatcaaaaaatctatgatgaaaccgagctggagatggcgctggcgtgggcggataaacacttccgctacggcgaagatcagaacgctgagcagtataagcgcaatgaaacgcagagccgcgcggtgctgaaagagagcctgctgatggcgatgtgcatccgcgacatgatgcagggcaacccgaagctcgcagaaaaagggctggtggaggagtcgctgggttacaacgccatcgccgccggtttccagggtcagcgccactggaccgatcaataccccaatggcgataccgccgaagcgctgctcaacagctcttttgactggaacggggtgcgcgaaccgtttgtcgtcgctaccgaaaacgacagcctcaacggcgtggccatgctgatgggccatcagctcaccggcaccgcccaggtgtttgccgacgtacgcacctactggtcgccggatgccgttgaacgggtcaccgggcagccgctcaccgggcgggcggagcacggcatcattcacctgattaactccggctctgcggcgctggacggctcctgccagcagcgcgacgcgcagggcaatccgacgatgaaaccccactgggagattgagcagagcgaggcggatgcctgcctcgcggcgaccgaatggtgcccggcgatccacgaatacttccgcggcggcggcttctcttcccgcttcctgaccgaaggcggcgtgccgttcaccatgacccgggtgaacatcatcaaaggtctggggccggtgctgcaaattgccgaaggctggagcgtggcgctgcccaaagcgatgcacgaccagctcgacgcccgcaccaactccacctggcccaccacctggtttgccccacgcctgaccggcaagggcccgttcagcgatgtgtactcggtgatggccaactggggcgccaaccacggcgtgctgaccatcggccacgttggcgcagatttcattaccctcgccgccatgctgcgcattccggtctgcatgcacaacgtggaagaggcgaaaatctatcgcccttccgcctgggccgcgcacggcatggatatcgagggccaggactaccgcgcctgccagaactacgggccgctgtataagcgttaacaggttggtttcgcccggaggcgcaggcttacctggcctacagacgcgcgcggtctgtaggccggataagcgctgcgccatccggcaatgttgtttcgggagtcactatgaggcaagacgttatcctggtcctcgactgcggcgccacgaacgtgcgggcgatggccgtggatcgacaagggaaaattatcgcccgcgccgcaacggcgaacgccagcgacatcgcggcggaaaaaagcgactggcaccagtggtcgctggaggccattatgcagcgctttgccgactgctgtcggcagatccatgaccagctggcctcctgcacggtgcgcggcatcaccgtcacgacctttggcgtcgatggcgcgttggtggatgagcagggcgccctgctgtatccgatcatcagctggaaatgcccgcgcaccgcggcggtgatggagaatatcagccagtatatgctcgcgcgccagctgcagcagatagccggcgtcggcgcgtttgcgttcaacaccctgtataagctggtgtggctgaaagagaaccacccgcagctgctggcgcaggcccatgcctggctgtttatttcatcgctgatcaaccatcggctgaccggggagttcaccaccgacctcaccatggcgggcaccagccagatgctcgatctccggcagcgcgatttcagcgcgccgatcctgcaggcgaccggcctgccgcgccgcctgttcccgcggctggttgaagcaggccagccgatcggcgccctgctgccggaggccgctgcgctgctgggccttcccgtcgggatcccggttatctcggccgggcatgacacccagttcgctctgtttggcgccggcgccgggcaggatgagccggtgctctcctccgggacctgggagatcctgatggtgcgcagcgcgcaggtcgacacctcgctgctctgtgactacagcggctccacctgcgagctggacagccagccgggccgctataacccggggatgcagtggctggcctccggcgtgctcgagtgggtgcgcaaactgctgtatagcgctgacaccccatggcagacgctgattgacgaagcgcaggcgatcccgcccggcgcccagggcgtcaggatgcagtgcgacctgctcgccagccagcacgccggctggcagggcgtcacgctcaacaccacccgcggccatttttaccgcgccgcgctggaggggttaagcgatcagctggcgcagcatctgcaaaccctggaaaaaatcggcggcttcagggcgaaagagctgctgctggtgggcggcggcagccgcaacgcgctatggaaccagatcaaggccaaccgactcgggataccgatcaaagtcctcgacgatgccgaaaccaccgtggccggcgcggcgatgtttggctggtatggcgtgggcgagttctcttcgccagaacaggccagagcgcaggtcgcgtaccgctaccgctatttctggccgcaaactgaacctgaactgatagaggaagcctgagatgctcaaaaccatttccccgctgatatcgccggaactgctgaaagtgctggccgaaatgggccatggggatgaaatcattttttccgatgcccatttcccggcgcacagcatggggccgcaggtgatccgcgccgatggcctgcgagtcagcgatctgctgcaggcgattatcccgctgttcgaattagacagctatgcgccgccggtggtgatgatggccgccgtcgaaggcgatgcgctcgacccgacggtggaacagcgctatcggcaggcgctatcgacgcaggccccctgcccggatatcgtgcggattgaccgctttgccttctacgaccgggcgcaaaaagcctttgcgatcgttatcacaggagagtgcgctaagtacggaaatatccttttaaaaaaaggagtcacgccgtaatctcatgccggagcgtctgcctgatgcagacgctcaatcaatgatgggatgagaataaatgaaagcagcccgccagcaggcgatcgtcgatctcctgatcacccacagcagcctgaccaccgaaacgttgtcaaaacagctcaacgtcagcagggaaactattcgccgcgatctgagcgagctgcaggcgcagggcaaagtgctgcgtaaccacggccgggccaaagtgatccaccagcgcagccaggacagcggcgatcctttccacatgcgcctgaaaagccattacgcgcataaagccgacatcgcccgcgaagcgctggcctggattgacgaagggatggtgatcgccctcgatgccagctccacctgctggtatctcgcccgccagctgccggaccgcccgctgcacgtctttaccaacagccagcccatctgccaggagctggccaaacgcgaccagatcacgctcacctgctccggcggcactctgcagcggaaatatggctgctacgtgaacccggcgctgatttcccagctgaaatcgctggagatcgatctgtttattttttcctgcgaaggcatcgacccgcagggcgcgctgtgggactccaatgcgttcaatgccgacttcaaatcgatcctgcttaagcgggcggcgcagtcgctgctgctgatcgacaaaagcaagttcaaccgctccggcgaggcgaggattggtcatctggatgacgtgacgcatattgtgtcggatgcgccgcagccttaaggggaaggccggaggacgcgcacgcgtctccggcctgagggggaaggattaacgctcgtcgcgacgtccgccgacggcggcccacaggcggcgcacgtgaacggtcacttcttcacgatcgtgatacagctgacgcgcctggatctgggcgttaacgccgtgctcgtccagctgggcctgaatataggccagattctgcgacacctcttcatagcgctttttcatcggcagcttgaggttgaagatggtctcccggcaccagccgttgaccagccactgcgccatcagcgccgccaccttcgccggtttctccaccatatcgcagaccatccacgagatgttgttgcggttcggacgatagcggaaaccgtcttcgcgcagccaggtcacctggccggtatccatcaggctctgggccatcgggccgttatcgaccgaagagacccacatgttgcgcttcaccagctgataggtccagccgcccgggcaggcgccgagatcgacggcatacatgccgttcgccagacgctcgtcccactcgtccgccggaataaagacgtggaacgcctcttccagcttgagggtggaacggctcggggcgtcggagggaaacttcagccgcggaatgcccatatagaacggtgagttgttgttgctgtatgagtagccggtatagcagcagccgggtgcgataaagaacacatgcaccaccggtcgctttggcgtttcatagttggtcagcacgcccgcctcgcgcagcgccgcgcgtaacggcaccgtaaacttgcggcagaacttcatcagctctttgctttcgttggtatccgccacttccacacgcagctcgccacccttctccaccatgccctgcagcatgccgacgatcggggttatgcgatcctccggcggcaggtcgcgcagcagttcgccgaccacaaacatctgacgggcaaaaatcagcgagctgaacggcagatcgcgcaccagcttctcgccgtcgtcctgctgataaccttcaaaaattacatagccagagtcttctttgacccgggcaaaaccaaacacctcaaggcgggctgccttatcggtaatttctgctgcgcactctttctcaaacccagggcgacaatagaggacaaccttattcatgaacaacgcccttacgtttcagacgaattgcaccaattaacattaaaacccaaccggcgaggaagcttacgccgcccaccggggtcacgaacgcccacagacgtaaatgagagagcgccagacaatagaggctgccgctgaacagcacggtccctaacgccagaaacacgctgctccagtagaaccagatgctgatccgacgctgcatcgccaccgccagaccaaaaatcgccagggtatggaaggcctgatattccaggccggtatggatccaggccatctccgccgcgccaagcgattgacttaatacatgcgcgccaaaagcgcccagagccacaaagataaagccgctaatcgcggcgaatatcagcataaaacggctggtcatgttgttaccctacaagtaattattgttcataacgaaagcggaatttttcttgttcacttgccgctttcgccaagatccactgccggaaagcggctattttacccagttctgcctgactgtcatggcaaacaaggtaaaacgcattcttactgaccagaacatcattaaacggacacaccagacgaccggcttcaatttcggactgcgccatgacattgttggccagcgccacgccctgcccgtgaatggccgcctgcagcaccatcgcgctatggctgaaaatcggcccctgctgcacattaatatggcttagaccaagctgacgggtataagtttgccagtcgcggcgggacgcatcgtgaagcagggtatgttgcgccagatcggcaggcgttttcaatgctttgtcgccggtgagcaagagcggggaacagaccggcagcagatactcggcgtacaatttttccacacgcaggcccggccagttgccgcgaccataaaaaatcgccacatcgacatcgtccgccagcttatcctcctgacggtccaccgcctggatcctgacgtcgattcccggataagctgagttaaagcttgtgagtcttggcaccagccactgaatggcgaaacttggcaataaactgaccgttaatgcccctttggcgctgcgcgcctgcagtttacgcgtcgcttccgtcagttgcgaaaaaatctctttaatatcctgaaaatagctctgcccttcttccgttaacagcagcgaacgattgcgccgacggaacagcttaaggcccagaaaatcctcgagagacttgatttgatggctgactgcggcctgcgtcacaaaaagctcatcggctgcccgagtgaagctgagatgacgtgcggctgcatcaaaaacacgtaatgcattcagaggtggtaatcgcttcgacatggttattctggcttagatgttaactcaatttaacaaataggaaacaatgattaacctattagttttttttatctgagccattataaattgtccgttgaggttctaccagcaaatacctatagtggcggcacttcctgagccggaacgagaagctttttttggaatgcgtgttccatcaagcttttggcttacggttgtgatgttgtgttgttgtgtttgcaattggtctgtttttgcagaccctggtagcaaagctaccccttttcacttcctgtacatttaccctgtctgtccatagtgatttaatgtagcaccgcaacgcgcggtgcttttttttgcctttttactgccttactcgtccagttcacccagttgtttcacgtcagagcgattgatctgctgtttgttgccccacgcgtctttatacgagatcatgccagtgtcattatcggtttgcggtttcccgtcggtaacgatggtccgcccatcgttggtatgcatcacatagttagaggaacaggcgctcaggcctaaagtcagcatacaggcagagataatcgcagcggccttagtcattttcattcttctctccttacggctatttatactattcgtaactcgttaagtaataggttaaaacacaaacccaacacttttcagcataaccctctttgaccgacgtggagtcacattcggacaattccacaggacgcagagaccttgtcacgcccggcaaattgcgcgacgatcgcggcattgatacgaggaattccatgaacgcattcaacccggcgcactttcgcgcgcagtttccggctctggccgatgccggcgtctatctcgacagcgcggcgacagcgctcaaaccgctggcggtgatcgacgccagcgaccagttttatcgcctgagcgccggcaatgtccatcgcagccagttcgccgccgcccagcggctgaccgagcgctacgaggcggcccgcgatcgcgtggcggcgtggcttaacgccccgtccggcaaagatatcgtctggacgcgagggaccaccgaggccatcaatatggtggcgcagagctacgtccggccgcgcctgcagcctggcgatgaaattatcgttagcgaagccgagcatcatgccaacctcgtgccctggctgatggtggccgggcagaccggcgccagagtggtcaaactgccgcttggcgccgaccgtctgccggatatcgccagcctcagcgcgctgattaccccgcgcagccgggtgctggccatcggccagatgtccaacgtcaccggcggctgcccggacctggcccaggctatccgccttgctcacgccgccgggatggtggtgatggtcgatggcgcccagggagcggtgcatttccccgctgacgtgcaggcgctggatatcgatttttacgccttttccggccataagctgtatggcccgaccgggatcggcgccctgtacggcaaaagcgagctgctggcagcgatgtcgccctggctcggcggcgggaaaatgatcgccgaggtcagctttgacggctttacgccgcagccggccccctatggcctcgaggccggtacgccgaatgtctccggggttatcggcctcagcgccgcgctggagtggctggcgcagagcgatatcggccaggcggaaaactggagccgcagtctggcgagcctggcggaagaggaactggcgaaacggccgggcttccgctctttccgctgccagcagtcaagcctgctggcctttgaatttgagggtattcatcacagcgatctggtgacgctgctggcggagtccggcattgccctgcgcgccggacaacactgcgcccagccgctgctggcggccttaggggtcagcggcaccctgcgggcctctttcgccccctacaatacccaagacgatgttgcggcgctggtgcacgcggtggatcgcgccctggaaattctggtggattaatgacaactctgcaccccttcggcacaaccattaccgacgctacgctgcgccagatcttcgccccgctgaaccagtgggaggataaataccgtcagctgattttattgggcaaaaagctgccgacgctgaccgacgagcgcaaagcgcaggcccatgagattgccggctgtgagaaccgcgtctggctgggctatgaggaggacgccgagggcaggctgcacttctttggcgacagcgaaggaaggattgtgcgcggtctgctggcggtacttttaaccgccgtggaaggaaaaacccgcgccgggatcctggcgcaggatccgctggcgctgttcgacgagctgggactgcgcggccagctcagcgcctcgcgcagccagggcctcagcgccctgagcgaggcggtgctcgccgccgcccgcgaaaggtaatctcccgatttcgctttcccgccgccgcgcccggtggggaaactactttccggaagccgcagcgtcacgctgcgctttcgccagcatcttcttcagggcatgcgacaccgcgacgaagccaaaggtcgcggtcaccatcgtcgccgcgccaaagccggaagcgcagtccatccgcttcggcccttccgccgtgctcttcattgcgcagacgctgccgtccgcctgcgggtagaccagcgcttccgtagagaagacgcagtctacaccgagcttacctttgctgtttttcaccaccccaaactggcttttcagccgctctcgcagtttggccgccagcggatcctggatggtcttcgccaggtccgcgacctggatctgcgttgggtcaatctgaccacccgccccgccggtagtcaccagcggcaccttgtagcggcgacaccaggcgataagcgccgctttcggccggacgctatcgatggcgtcgataacatagctaaagccgacgccaagatattccgccacgttttccggggtcacgaaatcatccaccaccgtcacccgacactccgggttgatcaggcgaatacgctccgccatcacctccgctttcgccagcccgacgttgccgctgagggcgtggatctgacgattggtgttggtgacgcagacatcgtccatatcgataagggtgatcgccccgatgccggtccgcgccagcgcttccgccgcccaggagccgaccccgccgatcccgaccacgcagacgtgggcgtcggcaaaacattgcagcgctttttcaccatataaacgtgccgtaccgccaaaacgctggcgccaggcatcgctgattacaacagacatagaacctcagaacaaaatgacagcgcccggaggccgccgcaagcggcgtcatccgggcgccctggtcaacaggcacggccaggggagttagccgctaaaaacattccccgcgcccggggcgtttttcagcacccatacgcggccgtagtggttataccagccggcacggtggcctgcgtcaggcccaatgccctgatagatgtcgaaatgctggcctttgatggccccgccgacgtcgagggcgaccatcaggcgcagttcgtactggccgttaaacttgccgttattatccagcagaggcacctcggccagcaaggtggttcctggcggaataatcgaccggtcggaggccaccgaggcgcggccgatcagcggcacagcgctggcccctttcaccggcgcgaaagactgcggtttaaagaacacgaacgacgggttctgctccagcagctcgcgcacttccgcttcgctgtgcttctcaccccactcgcggatcgcctgcatcgacatatcttctttcttcacttccccgcggtcgatcagcactttgccgatgctgcgatagggccagccgtttttcccggcatagctaaagaagttgagcggcgaaccatcgccaaagtcgatatagccgctgccctgcacgtccatgatgaagttatccatcaacgagttgctgtacgccagcacatagttatcgctcagcgcgccggcatagatgctggcgcgggacggcagcttaccgcgctttggcggcatacggtaaatggggtactggaattcgccctgacgggtgtggcgcgcctgcaccaccggcgtgtagtagccggtaaactggacgttgccataattgtcgacgccctgcatctgccaggcgtcgatgccaaactggcgcagcgtacgggtgtcgccgccggcgcgcagccactcctgcagcgcgttatagacgttgctctggctattatagaggcgtggcgaggcgttacgaatttgattaacctgctcggagaagtcgccggcgttgatcggcgccccgacggcatccggctggtttaccagtgaaaacggctgggtgaacttgccatcgctatattgctgaccgcggtcggtcggttttgaggaacaggcggcgagcatggccagcattgcccccgtcgctacatattttgcccaacgtcctttcatggtgtctcatcttttgctgcgaagccttagtgcgtgttgaagataacaaagcgccggagctattgaaatgcgcgatctcatcgatggcacagatttgtgtaaaaaaacaccacaacatggcgttttataagccaattcttacaaaaatgtcgatttggtcgaaaaaaggttgcatcatctcgctagcggagtatagtgcgcttccacggacgcggggtggagcagcctggtagctcgtcgggctcataacccgaaggtcgtcggttcaaatccggcccccgcaaccaattaaaatttgatgaagtaaagcagtacggtgacgcggggtggagcagcctggtagctcgtcgggctcataacccgaaggtcgtcggttcaaatccggcccccgcaaccaatcaaatttgacaaagtgaagcagtacggtgacgcggggtggagcagcctggtagctcgtcgggctcataacccgaaggtcgtcggttcaaatccggcccccgcaaccaacattacaaacaccctcaagggtgtttttttgtttctgccgccagcaaaacctctgccgaaaacgggaacggccattgccgccccctcgccggtttgctttatgtcatccgtaacagcccctgaaatacaagaaaccgcaatttatcaacgtctttttatacttccctgtatctctcaggagatccacagatgatgcgtggacaaatgagtgtacggctaaaagccacttacttaatccactcatttagagttttgcgcaataaaaggactaaattcccggaactaccgttatctttacgtttgtaatcggcccctggccaacaagaatgaagatagcagacttggtataatcattatatttcggtgcttatcttgccagacagggcactgcaacaaacaggatttaattgagataatgtatctatgatagttttcattataagtcagcaccatactttcattactgaataaatcatgataattgatgcaaatgttatatttttgataccagagcttcttctgattgttttaaattatggtattaattccatcctttccccttctgtacttcactaatctcgcagtagatggtcgaactttttgccaccaaatcattcacagcaaaaatatcatttattaaagaagcttttatttattccgaaaaagtggcgttgcgatattattacgcgatcgtttatcggtattttatgcttatacttagccataaccaagcagattgcccttgatggtcaataaattgagaaacttcatataaataaaactatcttaggatacgagccaaattatttatagtagtaataaaaacgatctttcagacactgaccacattgcaccacgctttatttaactgttaaattggatcaaggtcagatacttaaacaagggttagttagacagggagaagcaacatggctaaaaaatttctaaacgatgttcccgaaactcgctttaacataaagccgggcctgaaaacaggaagtgccatgaatgtgaagttacctctacatcttctctccgccagggattgtagtgtccaccagacatttattaactatagccccagtaattggccttaatttaaaccaaaacaacttcactaacgccatgactgaacctggagcgatggaagaattaacaagaatgtcgttacaggagaggggttaacctgcacgcctgggaaagtcattgggcaaaaccggataaaagtttcaaaagggaaattttgatgtctgcaaaggaacatatttcttcatctgcggctatgtcaacaatgatgggatcaggcggcatttatcagtcgttgtttaaaaaaatacatctgacggtagctatccatactccactttcctgtctggcgaaatctgcggaggatgtggttatgcatcagccagacgtccagcacgttaagtcacgctggcacggtctcaggtttctcaaatgccaaaagcaaaaacctgaccgggcggtggtgtagtatgaaaattcatcgaccactatgggctgagggaacgttcctgtcctcacaacagtttcagcagcaggcccgctgggaaacgtacagtaacaacagcattgcacagctgggtatccgtcatccatggggtgtggcgagagtcgagtttgacagagaagcgttggcgttagggaagttaaaattacgtaccctgcgcctgcgtttttccgatggctcgttgatcgactccgaagtttccgatgcgctgcctctggcttgtgatttacatactctggcggtggaaaatacggcaatagttgtcctggcgttaccgctggaacatgcgaatggcggtaatctgggacaggaaaagcatactgaaagacccctgcgttatcgtcaggaatggcataaagtacaggatatttatggcagcgacagtgaagaaatggccgttgaatgccatgcgctgtcattgcgtttcgcccatgataacaatcaggattacatcacctgcccgcttgcacgtctgacgcggaatggtcagggtaactggtctcaggatgaaagctacatcccgccgctgcttgccctcagcgcacatattggtctggtggagcgactggatacgttgctgttgcagctacaagcgaagtgccggcgtctgatggccctgcgccgggaaagcaatcagcgtatggcggacttcgcggtagcggatgtgtccctgttctggttactcaatgcgttgaacagcgctgaaccggttctaagtgattttttacggtatccgagcatccatcctgaactcgtctggcgcgaactggctcgtctggccggcgcgttgctgaccttttcccttgaacacaacgtgagcgccattcccgcatatgtccatgatgctccagcctccgtttttccgccgctttttaccctgctcagcgaactgctcgaagccagcctgccgtcgcgggtgattgcgctcgagctggaatcccttcccggcaaccgctggaaagccgaacttcacgatccacgcctgcgggaagaggcggatttttacctttctgttcgctcctcgctgccgacgcacgtcgttctgcaacagttaccacggctctgcaaaatcggggcgccggatgacgttacgttgttggttaatgttgcgctgaacggtgtccctgttgttccgctgacgcaggttccggctgcattgccattacggctggagaatcagtactttgcgctggatatgcagagcgctccggctaaagccatgctggatgccgggtgctgcatgatttacgcgccgggtacgctgggcgatctgaaacccgagctttttgcggtactgcggtcatgacacaggaacggaaaatcgacattgacgtactacttcgcgacacctttctgacggtggtggaactgcgtcagggcacttctgcaagacacggacaggaactatatcgccattgtctgcagcaggtggaaggggtacgcgagcgtctgacagcggccggattcagccagcaggacatagaacatatcacttacgctcagtgcgcgctgctggacgaaaccgttctcagccgggacgggatggatgatggccagatggtctggctaaaaaaccctctccagtcgcattttttcaatacccttcaggcgggcgaactactgtatgagcgtatgaagcggtttttacaggagccagcccccacgccggcggtcctgacctgttttcatcgcgtgctgttgctggggtttcgcgggcgctatcaggaccccgaatctgatgaacggcagcatctcattgcgatgttcagcaagagggttgagccattcagggtgcaagaagattcggcagtgctgaacgtgcctttgaccaggcgtcagcattacctgtggcagtctcctttttgctggctgctactgctaatgcttgtgctggttggcgtctggtgggggttgcatagctggctgaatgtactggtggatgaactgctgccaacaggcaagtcttgaagatgagccgggtgagtaacacgctgaaacaggcgcttttgctgtggagcatgctgctggtgctggcgctatggctgggattcaatcaggcctctacggcgatgaaatttggcgtgacagtggctcttatcatcatcgcagtaggcctgctggcgtgctggcgcggaaaaaaaagacagactgaggccgacagcgcatggctgtcccgattgccgcccaaaacatatcggcagcccgtagtgctggtgtgcggcgacgcggcagcatcgttattcacagaaaacccgctgcggcaggtcgcgggagggctgtacctgcacgttgcggatgaagagcaacttatcagacaggctgaagtgctgctggctgaccgccccgcatgggcttctcagttatgtgtggcctgcacggtcgtgccggttgttcatctggatatggctgttctggcgggacgattgcgacgctttgtcggcggtctggcgacagtgcgccgcagggcgggcataaaagtgccgctgctgctgtggagctggctgcccggcacagggcgagaggatgatctaccgtggtttatcttcgccggcggcaaggttcaggtggtgacgcccgccggagaaagctctccgacggcatgggcggcacagcccggaaccgatgggagcagcctgcggctttgccatcttctgcggatggaaagcctgatgcagtggctcaatcagatggtgttaccagagctgaacgggtatccgccgctggcggcgggcatggggcaggcgccatcgctgcctgcgctggaaggcaatctgtggcagacatggacaacggcaaaaacgggactgacgccggaggcgataccgaagatcggcgcatctcccctgccgttcccggacatgatgctgccgctgttaccacgtcaatcaggatttacgccagtgcgccgcgcctgcgtggcggcgctgctgatgaccaccgtggcaggagtggctgcgctctgtctgtcagcaaccgcaaaccgcagcctgctgctgcaggtgagcgacgatctacataaatatgatgccgttccggcagacaacgacgccgctaaagcccaccacctgtcggtcctgaaggacgatgcaaatattctggatagctattttcgcgaaggggagccattacgtctcagtctgggcttatatcccggcgaacggctacgccagccggtatggcgggttattcgcgattaccgtccacctgagaaaaaaagggatgtagcagacgcattaccggtacagagcgtgcgtctcgacagcatggcgttgtttgacgtcggacaggcccgtctgaaagacggctcgacaaaagtgctgattaacgcgctggtaaatatcagggcaaggccgggctggctgattgtggtcaccggatataccgatactaccggcaataaaaaagccaatcagcaattgtcgctgcgacgcgcggaagccgtgcgcgactggatgctacagaccagcgacattccggccaccttttttgccgtacaggggctgggcgaaagccatcctgcggcaactaacgatacgccggaaggcagggccgctaaccggcgcgtcgaaatcagtctggttccccgcactgacgcctgtcaggacgtgaaacagaacatgctgccagaaccggcgttatctcagttaaatccacaaggagtttcagccatctaaccatggctggcaggaagccttctgcttttttggcacgggttcgatatgcggctcgctgaatatcggtggtaccggtaccgagcaaccgctattcacaatttagcctgatgtaaacctgatgggcacgaggtcatggctatgggcggtagcgtgcctgaacagggccccgcaagaggaaattctgtggaatttgttacgaaataaggaagcccacgatggatgtacagaacttcgaccactcacaccacgcgttaaaaatccgcggcctgagcagcggcgtggacgtactgtcctttgaaggcaaggagcaattaagcgccccattccgctatgacattcagtttaccagcagcgataagtctattgcgccggagtcggtgctgatgcaggacggggcattcagcctgaccgccccgccggtgcaagggataccgacgcagactcccctgcgtacgttgtacggggtgatcaccggatttaagcaattgtcttcctcacgggacgaggcgcggtatgaggtgcggctggagccccgtctggcgctactgtcccgcagccatcagaacgcgatttatcagaaccagacggtgccgcaaatcgtggagaaaatactccgcgagcggcatgagatgcgcggtcaggactttgtgtttaacctgaaaggcgactacccgtcacgcgagcaggtcatgcagtacgacgaagacgatctgacattcatctcacggttgctgtcggaggtgggtatctggttccggttcagtaccgacgcccgactgaaaatcggggttatcgagttttacgacgaccagagtggctatgagcgcggcctgacgctgccgctgcgtcacccttcggggatgagcgacagcggaaccgaagcagtgtgggatctgaacacggcctacagcgtggtatcgaggtccgtcacgacgcgggattacaactaccgtgaagcgatggcggagatgacaacaggccagtttgacgtaacaggcggggataacaccacctacggtgaagcctatcattacgctgacaattttctgaaaacgggtgacaaagcgacgccggagagtggtgcattctatgcgcgtatccgccacgaacgctacctgaacggacgcgccatcctgaagggacagagcaccagttctctgctgatgccggggctggagataaaggtcgaggataatgatgcgccagaggtattccgcaagggcattctgataaccgggattaccgccagcgcagcacgagaccgcagttacgaactgacattcaccgccatcccctattccgaacgctacggctaccgccctcctctcatccgcaggcctgtgatggctgggacactcccggcgcgggtgaccagcaccacggcaaatgatgtctacgctcatatcgacaaagacgggcgctatcgagtgaacctggactttgaccgggatacgtggaagccgggtttcgagagcctgtgggtacggcagtcacgcccctatgcgggagatacttacggtctgcacctgccgctgctggcgggaaccgaggttagcatcgcgtttgaggatggcagaccggacaggccatatatcgccggggtgaaacacgactcggcgcacaccgaccatgtgaccatccagaactataagcgcaacgtgctgcgcaccccggcgaataacaaaatccggctggacgatgagcggggtaaggagcacatcaaggtcagcacagagtacggcggaaagagccagctgaacctgggacatctggtggatgctgggaagcagcaacgcggtgagggtttcgaactgcgcaccgatatgtggggtgcgataagagcgaaaaaaggtgtctttatcagcgccgatgcgcaggaaaaggcgcaggggcaggcgctggatatgcaggcagcaataacgcaactggaaaatgcgttatcgatagcaaaaagtctgtcacaggcggcggaggtggcgaaggcgcatggtgcggatcttgatgggcatacgtcgctgaacggcgcgctgtcggagcttgtaaaggcagggatagtgctgagcgcgccggaaggcgtggggattgtaagtccacagggcgtcagactgggttcgggagagagcagtatagggctgatggcgggaacaaatattgatgcaggggcgatggagaaggtgactgtctcggcgggagacgcggtgagtgtatttgcgcgcaagggagggataaagctgtacgcaaaccagggaaaagttgaagtggaggctcagaacgagagaatgcggctgacatcgcgccatgggatgaagataagcagtacggaagatgtggtggagatagaggcagagaaggaacttgtgctgaaatgcggcaaggcgtacatcaggctgagcggcggcggggtggaggtaggaggaccgaagaatatcctgttgaaatcagcgaatgtgcagaagatgagtaaagcgcagttgccggttgagatgcctgtgctgccgggaaaaggtaattacgatctgtcgctggatctgcgggactgggatggtattcccattggtggcgcgaagtacacaatcgcttttgagtcaggggctgtattgtcgggcatgttagatgataaagggtacgcactgcataccaatgttccccccgaatcagcaacggtggaatacgaatttccagagccggaaccggacaaaccttgggatccctattcgtccctgcttgcctcagtagatgctgaattagggacggatggacagggagcataataatggatacagacactgatttagacagagcgctggctttttatcagccgccaccagaaagctggtattctggcatacataagaaaattgaagcgaccgggcagtggatttgggaaaccattcagggggattttaacgataaccagagtaccgggcaggtagtaacaggtactgttatttctatgatccctctggtggatcagatttgcgatgtccgtgatctggttgctaactgcatgaaaataaaggaaggaaacgataaaaaaacagataccacttgggcatgggtggcaatgatcctcactctggttggtcttattccagttgcgggttccctgattaaagggattttcaaagtgctatttaattcgataagaaaagctgctcttgctgggaagataaccttaaaagctattgatgctgctgtctcgttatttaacagattcattgatatgaccgtagtgcaggccacaatgaaatatatgaggatttataacccctaccaatatgccgagaagcaggtcagagagctgattgcgcagctaaatgtgtccgtgctgttgacgaaatttgatgaattaatggaagtcactggaagcctgctggataaagccaaatcttgggggccggaatctattcgccagccgattgagacgacctggaaattactggtttctattcgtagtcaggccaatactatgctggagaaggcactggctccgctgaatgagacactggaaaagctggccgcgcgtctacgacaggaaggcgataattattataaggcgcatactggcgctaatccgcatcgcccgactcgtcttaaagatgcagaagaggctgagttattggttcataataagccggactgggtggatgtgggggtaactgagaaatatccagggttgaaacaggcgagcgcagaacagaagagtctgatgcgactggaaaaggataaggaaggctggcctgctttgtcggaagataatataaaaagctttcatcaaatgcgttatgttgagctgccacagaatgaaaaattgtaccgtgtattggatcctgccagtagtgataacagtttttgctggatgcgtgaggctgagtttatggctctgaaaagcaaatcgcagtggcggcgacgttttgcggtatggaagagctggaatgaaaatggcgaatatgtggtgtataccgtcccgccaggcaccacaatgaaagtctgggaaggtcccgctgcctcacagtcgcgtagtgtgactgataatggtaaaaatgtggacatagtgttggaaggtgggggaattcagatagtgatagacccggccgatctgaatctgaattatctggggaaacgtcagcacacagggtggggatatagggatttttctgatgaagtggatatgtatatcggcattccccagttgcaaactaaaattttcgtgcctgaagagtgataaccacaggaaagattgataaataaagaaggaggtaatatggcgatattgcacccccaagagtgctggctgctagagcgagcaatgtcggtggaatattatcggaagcgttatgaggcgtggcgggcattggttgagttatgtgagtatcaggtggctgaatgggcaaaaagcatgcctctggatatccgtcggcgcccgctgtatgaacagattgatgctgtctggggggggcgggtactgcccaatattcgcggtacattaaagtcggtacattatgattttctacagcgtcagcaaaacgatccaaatgcactgcattctgggggaaatatcagtagtgatcggcgggggttgatagattatttcccgaactggatgcctgatgtagctcagaagcaatatcagaaactactctggcgggcggggttctatgatgatctgataaaagacacttcgacgggttattggtacgaaggttcgctgacttattactatgaagagagtctttatggtccactggcgctacctatgcaactgccactctatgaactggatcacagcgtgtatctccgggaaggcgatccggtgacgattgacggtttgtacctgccggatctgcttgatgcgggggcgcgcctgatgtatctgagggagaatattcctgatgcatggcagggacgtgtgcgaactcagtatgtcaatgatgttggtcagcaggagtattactgggaggaaggggcatggacaaaaaccaactggatacggatacggcgggtgaaaaaccggtttatcaacgtgccgctggaaggctttttcccgcggggaaccccggaggagctttacaactggccgcaacgtcagcaacagtacatcacggaacagcagcggataagcgcgtccagcggcgaaccctgtccacacggcggtgaatggtcgatttttgtggaggacaaaccggtcacggtaacgctggagcagggggaactgatgccggaatgggaagacagaacaatggaggaggagcataaacaaggcgaaaagtttcatgttttgtggtccctgatggcgcgacacgacggcggcccggtgtgggtttctgaagcgggataacgtccgtcagaaagaaatggcaggcggggataaaaacgcggaaagaaataatgtcccctacactcactggggacataaaaggattttattctgacaggagaaagcgtaatgctgaaatcattattgacaggattgttctttatatattttctagcaggcaatgcatatgccgaggattataatgatattttctggggcatgttaaaaaaagaaaatcaggagattgtttttgtccgttgcgacagtccgtcattaaaaatgaaaatagtcagaaccgcagatgctaatcaagaaaatatagaaaaggcgtaccagacgtttaatcagagtaaaggccagtcgatgtattttgcgtttatcggaaacgtcaaagataccgggaatggcaattatgtatttaatatgtatgacgtgatggagacgaaaacggggcgctgtaatctgacagatgcgctcaataactggaatgtgtcacagtgacatttagcgtaacgtatttttccgtttaatcacgccacctgataaagataaaatcatgttcaaacggtggtgaagctgtttatttcgagttgaatgaagttggctttaatgaattcattttcaaaaatcatacttcaggcgctatcaatgatgaaagatggaagctacatgtgggcggaaactggtttttatagatcgcaaggtaaatatgactggtgaagttgagcatatttacattcttaaatagctcactgctaataccttccaccgattgatgacttatttttattaaatggataaactttatggcatggaaaagaaaacatattgaagagccagataggccactgaaaatacctctttataaatggcttctcaccttccttattcttagtgcgtttttattgctactcttttatctctttcgtgatgaaatcattagagataatgttactttattaatcttgttttctcctctaaccctgtgtcttttcctcttctgtttacaaatatatttttatgccagagccatgcaaaattatacggtaataatgcataacatcaataatatcaacacagaatgggaaaaatggggaggccgttatgtctctgtactaggcagtaaacttttccttcccggtgaagtggatggatcgtcactatcagataatcagtcagaggtaatgtatggtctagccgtgaggattgattattttagatgggaaactaatgactggttttctttctttactcttcttattgatgaaaatgatatttttaatcttcccgttcggattgcaaaagagtttattatccttacggactgtaatgaaagagaatatacccgtatggaggctgatttttccagagtgctggaggagatgaacatcatgttgccgtccggatctgtccgtcttgttccttctcttttatttgaacaacttgacgcctggctgaaagtgacagaagaaaaaatatatattgttctggttttacagcttaacggcaaagaaaattattcagatggcatcgtttcctttttattcgcagcagatgatgtagtaaaaaaatatcaactggatgaaaaagccagaatttttcgtccgatggttgtggtagccgatcgttttgataaagatctggatatttttattgatacgcaaaaaatagccagaaatgccacaggactgacaggggactgcgctggtctgttacccgtcagcggcagtattcttcaatgcttcaacgaaaaagaagggaaattacaagttgataatatccacgtaatggaaagcctcagtggtctacccggattgaattcggtctggttaactgcggcgttagcagtctcggcggcgtcttatcaaaaatcagattatctgatgatggccagatatgaagacgactggataattactactgtccacccggtggaggcttcatgaaatctgcaaacaataagttaacgattattgcagacgtattgctgctcctgctttttgcggctgtattgggttttattatctggcgttttggtgatctttttggattaaccggggataaaaataagttttatatatggctggctggcataatgtcgtttatttttctgcgggcatcctggtatttttcccgtttatacagggttcgcagggaacggcggcagtctgaggaacagggggaatacccggaaaaagaaattcgttatgaacctgggcaaagaacatctttgtattctgaactattttttcatcttcgcgaccgttacggtctgttctggcagcgtcaggtccgtctgctgctggtgacgggcgagcctgagcaggtggaagccatcgcgccggggctgacagagcagcgctggcaggaaggcgaccatacggtgttgatatatggcggcaaggcgtcggcagagccggataccaccctgctggcctccctgaaaaaactgcgccgcttccgcccgctggacggtattatctggccgctgacggagaaacagagttgccagacggcgcaactggataagggctggcgcgaactgggtaatggtggaaaattgcttggctttcaggctccgctgtatctgtggcaggtctgtgatgacggaggttatcaggccgggcgcacactacaaagcgtcggctgcctgctgccggagcgaagcacaccggaacaactggctacacaactggaagcacagaccccgcaactgacggaacagggaatgtcgcagttgctgaccaataaccggcacgattttctgttgcgtcttgcccacacacttacagagcgcggcatcgctcactggcaaaccgtcctgaagcccttgctggcaggcggcgcattcccttctctgcacctgcgcggcctgatgttcagccctccactggccgccgtgccggaagcggctccccacgcgtggctgtcatcgctggtgtgggcgggcgttactggcgacaatgcaaaaggccgcaccgtgggctttccgtggctgcgcaccgcgctgatggcctgcttctgcgtgctggcgatatggtggaccggaatgatgacctcgttctttgccaaccgcgccctgattcaggaaaccgggacgcacacagcgcgggccatcaatacccgactgccgctggcagagcaactggttgcgctgcacaccttgcagggcgagctcgagcgtctgcagtatcgtatccgccacggtacgccgtggtatcagcgtttcggtctggagcgtaatgctcagttgctgaacacggcgttccccggctatgcgcaggcggcaaaccgactggtacgcgatgtagcggtcgcccacctgcagcagcaactgaacgcctttgtcgccctgtctccgaacagtccgcaacgcaccgcaacgggagaactgcgttataagcaactgaaggcgctgctgatgacgtcccgtcccgaaaaagccgacgccgcctttttcagtaccacgctgatggcagataacctgcgctatgcagatgtaacggaaggtacccggcaaagcgtgctgccgtcgctgctgaccttctggatggcgaatctgccggagcatccacagtggaaaatcgccccgcagccggaactggtcggcgcggtacgcaaaattctgctgcgccagattggggtgcgcaatgcggaaaataccctctatcagaacgtcctgaaacaggtctcccgcaactacgccgatatgacgctggcggatatgaccggcgacgcgcaggccggctcgttgtttggtactgagcaaacggtgccgggaatgttcacccgccaggcatgggaaggtcaggttaaggaggccatagagcaggtggtgacggcccgacgtgaggaaatcgactgggtactcagcgaccgtcaacaggacgcttccgccgatatttcgccggaagccctgcgtacccgcctgacggaacgttacttcaccgacttcgccggaagctggctgacattcctcaatagcattcgctggaagaaagaggactcgctgtccggcgtgctggaccaactgacgctgatggccgatgcccgccagtcgccgctgattgcgctcacggatacggtggcatggcaggcggcggcaggaagggaaagccgtagtctgtcagactcgctgacacaatcagcaaaagagttgtttaacggtaaagaaaaaacaccgcagaacacccgtgccgcccgtgaagaagaagcaccaacgggaccgatggacaaaacctttgccccgctgctgcggctgaccggtgataaagccggaggcactggcgacagccagctcagtctgcaaacttacctcacccgcgtgacccgcgtgcgcctcaagctgcaacaggtcaccaacgccccggacccgcaggagatgacgcagcagctggcgcagacggtattgcagggcaaaaccgtcgacctcaccgatacccgagattatggccgtctgatagccgccagtctgggcgaggaatggagcggcttcggccagtcgctgtttgttcgtccggtggagcaggcgtggcggcaggtgctgacgcccgcagcggacagtctgaaccggcagtggcagcgggccattgtcagccactggaatcaggatttcgccgggcgttatccgtttaaggacactccgaacgacgcctctctccccctgctggctaaatatctgcgcgatgacggacgtataagtcagtttatcgctaccaaccttgcaggcgttctggaacgcgaaggtcgttattgggtggctgacaccatgaacacgcagggactgacggtcaacccggcgtttttacgcgccctgaatcgcctgcgcgatgtggccgacacagcctttgccagcggcgatgccggggtacattttgaactgatggcaaaaccggcacgtgacgtgatgaaaacgcatctggtgattgacggccagcaactggaatatttcaaccagaaagaacgctggcagcgtttcagctggccggatgagcagtggcagcccggcgcatcgctgagctggaccagtacgcagaatatggaacgtattctggccgacttccggggaagctggagctttattcgtctgctggaacaggcgcaggtcacacagctggacagcagcagctttatgctgcagtggcaagcgccggacggtctgccgctgcattacctgatgcgcgtcgaacagggtaaagggccgttggcgctgctggcgttgaaaaactaccgcctgccgggacaggtgtttctgaccgggaaagccataagtgatgcagaagaatacagggacaacgcagatgagtgagttactgcaacagttaacccggaattgtttctctgaccgggatgcgacggccgtcgcacaggagcaggctgcactgtggcagagctggctgctgccggtgacggaggattcgccggtgggtgaagaccccggctatcatgacgattttttgctgatgcgcgacgaaatgaacaaatccaccgcgcaggggctgacgctgacgcagtgggaatcggaactgctgtttgaggtaaaaacgcggcaactgaagctgttgcgcctgcgggcgcaccgccacgcggacaaagcggcgcttgcccggaaaatgggaaacctgctgggaacgctggtggtaatggatccggcacaggcggcggtactgtgcgacacgcagcataaggactgatggcgtttatcagaaggactaatacctgctgtctgtgatcaagggcttagggggactaagagggaaggagttatggcgcgaaggctggcaagactgggagataaaacgacatacggctatgtggcaagcgctacgtcatcgatcatagacggcaaaaaactggcgctgaatggcgacagggcgtggtgtaacaagtgcaaagggatgttcgggattgtcggcacggcgcgtgggtggtctgaggattcgctctttgtcggtaacggcgaccgtgtggcgtgtaaatgcgcgaacaatcaggtgattgccacttcggatttgtttgatgaatgaggtggcacggaaaaccataccacatcaggcaagacgaataatcttaccgcagcaagtacaaagccgcagaataaaaaatacagccatcagataaaacttttaacgaaagaggatgacgttggtttagagggtatcccttatgtattcattctgagtgatagtaccttcagaaaagggaaaacgaatccgaaccgggaaacggagcgaatttatacggatgcggcggagaaggttacggtgttagttggtaagctggcgtattcttgggaaaaaagaggcggcaacttcggttcattaaaggagataaatgaaagaaaaattgaactgatgacagctgagcaggagccggttgaaaatgttcagtggattactggccgggattatattgtggtggtggccgcaaggacgaaatttaaagattctatggggaatcagtatcgttttgtaaactgcggattaagacagctacggctttttcctgaagtgaataaagataattattatatacagcgtattttcctgatgtttcagcagggatatgtggagaaaggcattgaattaattaatgaatatgttgaagaattaagtggtcgcgtggtttatgtgaaagacaaggctgaatttattaaattcctgaacagcagaaaagacaagaacagagtaattaaggagatggttattctgtgtcacggaattatcgacactgcatcatttgattatcatcatgaaaataaaggaaaggaaaagaccggtgagtttaaatccagagatgttgttgacgttcaggaggctgtctttgattatgatgccgttgtcacaacctatgcctgccgggccggtatttctgttaatggaaaagacctgaccggaatggatgccggacaggaaaacagtccggcacaaaagatggcggcttgctgggacgtgagtgtcagagcgtttgaaatgcggtcggattattcatcgatttacggaacgaaaaaagaaatacgtgcagcagaaaattatgaagatgttattgaagaatacgaggaaagcctgagtgaatataataagaaaaaggcgaatggtgatgtcgatattacgccgccccagaaacccgaaaattatgatgagatgtcaaaacgctatgatgatgtcacagcgagagatgctaacgctaaacgcggtgctggtccaattgcgccaaatggtgcgtagcgtatgccgggaaccggggatagcccagaggggctgaaagaaggattacagacctatcaacccggagagtggacattgtgaactctttaaaaatgaagggatattactttctggttgttcttttgctgacagccttatgtggtggaggatatgttatgtatcaacagcaatacaaaatggcggtgcatgtgacaccggagagtgaaaacgatccggagtggccgtcgaaaaagaagtggtttgatgccagtgaatggttaagtactccacagtatataaaaatcaatgatttttatgtgataaatacccgctatgttccaattggtgatcttaacagcgatcagataatattttatctaaagaaaggtattaatggttcagaaaaaagattttcagagttatctgtattatctgatctggataatcaagagtttcgggaactaatgaaagataagctatcctctgaatatctcgaaacccagtttgaaaaagagaccttaacgccaactattgatttctttcttatctattttatctacaataataagaggtatgaggtgccgatccgtagggagtattcggggaataaatatcattattgggtattagagggttcggtgaaaaaagccggatactggcatgaaagatttcccacctcatattcatacagaaagtatctgaataagtaaaaaattaaataaacgcaaccgtaaaaaacatgatttaattattatatattgataattgctcgcgatatatttttcgtaaaataatatcaacatcggttttacatctgaagacttgcactatatttacttttaatgaaaggagaataactcctgcttatggacgacctgacccaacgctattacgaagccgaaatgcgctacctgcgtgaagcgggtaaagagtttgcacaagcgtatcctgatcgcgccgctatgctcaatctcgataagcccggcgcgcgcgacccttatgtcgaacgtctcttcgaaggtttcgccttcctgatgggccgcctgcgggaaaaactggatgacgatctacctgaactgactgaggggctggtgagcctcctgtggcctcattatctgcgtacaatcccgtcgctgtcggtggtggaactgttaaccgatcatcggcaaatgaagcagagcgaaacactgagtgattttcaggtgctctcgaggcccgtcggcgaacaccggacacgttgctgctacagcgccacgcgggatatcaccctgcttccgctggctttaccagaggtgtcgttacagtacgaacaggatggacgctcggttatccgtctgcgctttgagtgcagcccgctggctggcgacgggtcacagattgatttatcgagactgccgctctatctcaatgcggacagtccgctggcttgtgcattacaccgggcgctgacgctgggggtgcagcaaatctggtttcgcctgccgggggaggaacgtcggacactggacggctatttttccccgatggggttcggtaaggacgatccgctctggccaaaaggcgaatcggccttcagcggctaccaactactgctggagtatttcaccttccgcgagaagtttatgtttgtcgccctcaacgggctggagaatgtggtctggccggcaggaatgagtggattcgaaattgacgtggtgctcgcggaaagctggtctcacgatctgccgttcagcaccgaaaatatccgcctgcactgcgtaccggtgatcaacctgttcccgctggaagccgatccactgcatctttctccgctggaaaatgaatacttgctgcgccccatgcgtattcaggacgggcatacggaaatttactccgtcgataatattatttcttcgcgacacaccggcagtcaggcatatgtgcccttttccagttttcgccaccggggcgggatgttgcgtcacgattcgccggaacgttattaccatacgcgggtaaaacgcggcccttccggtttgcatgatacctggctgatccttgggggcgacgcattcgatatcgaccgcctgctggaagacgaaaccctgtccctgagtctgaccggcaccaacggtcagcttccgcgtaaagcgctgcagagcacggtgctggacacccccgtctacgccacgcagcatacactgcgggtgcgcaacctgtgcgcgccgacgcagccctgttatcccccggcgcgtgaccgtttccactggcgggttctcagccacttaggctccaacttcctgtcaatgatggaaaacgccgaaatcttgcgcggcacgctggcgctgtacgactggacggaaagcgaaatgaaccgacgccgtctggaggcaatcgttgacgttcagcatcacctgattcagcgttttgaaaaaggttttctactgcgcggcgtggatattcaggtcacgctggacagcaacggtttcgccggcgaaggcgatatcaccctgtttggcgaactgctgcaccgctttttcgccctgtatgccgacatccacttatttactcagttgacgctgattctgcaacctacaggaaaatgtttgcaatggacagaacaccacagccagcgcgtaccgggctgacggaaaggcttgctccggacattaaccgaattaacttttaccgtttctgccagcttcttgaacaaagccaaccacagacgccactgctggggagcacaaccaatccggcagacgatcctgtccgttttcgtccacatccggggatggggttcccggtaagcgaactaaaaagcgtcgaacaggatttggatcatcctgacgcgccacccacggtgcgcaccacgtttctggggctgtacggtgtggattcaccgctgccgacagcctatctcgactacatcgcgcagcgccgggacggccatgaagcgatgatggcgtttctggacatttttaaccatcgctttatcactcagtactatcgtatctggcgcaaatataattaccttacgtcgtttgaaccgggagccgtggataatatttcccgctgcctgctggggttgattggtctgggcattcccggcagcgaaaatcatatcgccacgccggtctcgcgttttctggcattactcagcgtgatgcgtctgccgacgcgtacagcagaaggcataacggcgctggtcagattactggccccccagacgcaagcgacagttatcccgcacgatccacaacaaattgtcctgcctgaacctgcgggtttatcaaaaagatcaggtatttgcctgaaaactcgggcactgctgggcaacaccggcactgacgttaacagccagttactgatgaagctgtataccgaagacgacggagaggcacgcggctggctgccgggcgggcaactacataccgacctgctggtgctgttgcgtgtctatctgggctggcgctaccaggcccgcctgcaactgaccttgcccgtcagtctgctgcctccggcacagttaggaaatcagcgcgttcaggtaagccgaacgggcgtgctgcgggcgtcttttgctgccccagtcgccggtacggtcacggtcagtctcgggcgttatcagggactcatgcccacatcatccacccgcgacagggagagtgttactcatgtttcttacaccctataaacgacatgcagtcagcgtatttgccgccgtgacgctgctgagcggctgcggtctgactcagagagtgactgacggcactaaagaagtggcatcggcgattttctacaagcagatcaaaacgctgcatctcgattttgtatcgcgcagcgcgctgaatacagatgcgcaagacacaccgctttccacgatgatccatgtctggcaactgaaaacacgtgagcgttttgacgaggccaactatgacacgctacttatgcaggaagaaaaaacgctgaaatcagatgtactggccaaacataccgtctggatgaagccagcgggtgcggtttccctgaatgtccctctggataaagagacccagtttatcgccatcgttggtcagttttatcaccccgatgaacaaagcaacagttggcgattggtactcaaaagggatgaactggaagctgacaggccccgcaccatagagctgatgagaagcgatctccgcctgctcccccttcaggataagtaaccgatggcagcatcttctttatttgaaatgctgactttcagcttcagtggcgagctgccgctggagcaggtcagcgagcgggatcagcttattctctccgttatggacaacatgcagcgcatcatcaactgccgggcaggaacgctggcgcatttaccggattatggtttgccggacctcagcatgattcatcagggaatgaccgcgggtattcatggtttgatacaccagatagaagagacgttactgcgctacgaaccccgcctgagccagttgcgcgtggagttgcagccgcagccacgtccggggcatctcaattatcttatttatgcccaacttcccgataccggctggatacgctttgatggtatattttctgcggaaggccggattgtgctgcgtcatcttaaacagcaggagcgcgcgtgacttatgtcaggtagcgcaccttcattgagcttgcagattgcgccagaaaagtaacaaggaaaatcaatttattgattttcggctgataaccacaaaggaggaaaaaccacgctttttccttttttgccaacaacctgaaacaccctcaagggtgtttttttgtttctgccgccggcaaaacctctgccgaaaacgggaacggccattgccgcccccatctcctgcttaccccttcggtaacacaatattgcttgccgccagcatgcccatgcgatggtacatcgcgcaggccgcctcgacgatcggcatcgccagcgccgcgccgctgccttctcccagacgcatgcccatattgagatacggttcgagacccaggtgcgccaacgcgatacgcgcccccttctccgccgaatagtgggacgggatcagatacggtttcacctccggcgctatctgacacgccgccagcgccgccgcgtaggagagaaagccatccagcaccaccggcagcccacaggacgccgcccccagcatgacaccggtcatccccagcagatcgaaaccaccgactttgctcagcacatcgaggccatcattcgggtcgggctgattgacggcgatagcccgccgcaccacctccaccttgttgccaaccttcgccagcggcagattggcgccaatcccgaccacctcctgcgcatcgctgccggtcaggacgctgacgatcgccgccgccggcgtggtattggccatccccagttcgccgacgccaaacagggtaacgccctcctgggccagcgcgcgggtgtagcgcatcacctccagcaacagctcctgcccctgctcacggctcatcgccggaccgcgggcaatattgccgcagccccgcgccacccgcatattcaccacgccggggagcggtacgctatcgataccgacatcaattacatgcactttcgccccggcctgggcggcgagcacgcagacgccggtggtgccgcgggtcatatttgccgcctggatggcggtgaccgccttcggcgaaatcgccaccccttcgtcccacactccatggtcggcgcacatcaccagcaaggcctttttcgccacctgcggctggccgcccaggccgggcattcccgccagctgcaccgccagcgcctccagacgcccgaggctgccggggggcttgagtaagccgtcgatgtgttgctgtgcccgcgccatggcgtcggcgtccggcgcggggatcgcccgcagaaccgtgtttaaattttgcatacagaatccctgccagggctggcccggtcagccagcgattgagttatttgattttgacgccgatgccggagaccaccagccagaccgcatccgccgcggccgccaggcgctgattgacccgcccggcaatatcgcgaaaatgccgcgccaggcggttctccggcacaatgcccatccccacctcgttggtcaccagcacgacgtgcgccggacagcgctgacaggcggcaatcagcacgccaatttcgtcatcaatagcccgttccatggcggcgtaatcccagccgtcggggtcgctgtcgccgccgagcgcgaacagcaggttggtgaccatggtggtgatgcattccagcaaaatcgcctcctctggggcgatagccggggtgatcagttcatcaagctgctgccagcgctcggcggtgcgccagtgggcgggcctgccgtcgcgatgatgctggatccttgcggccatctcgtcgtcaaagatttgcgaggtggcgatatataacacctgcggcgcatcggcaatcagcgcctcggcatggcgacttttgccgctgcgcgcgccgccggtaaccagagtcagcataggggctcctgatgttggcgcatgatggcgtaaattttatcgatggcgatatgttcgcgcatggcctcggccagccgatcaaactggcgggttttatagcgggcatactccagggcgctgtccagcggcgccagccctttgcgctggcgcaggccgttgagcagcgcccgggtaaaggcatcgctgtcgaacaggccatggagataggtgccgaacgccaggccgtcgtcgcttatcgccccgtcgtccactgcctgccccgctttatgcagctgcagcagcggcgggcagcctgcctcgcggcgcgtctcgcccatatgaatttcgtagccactgacgcgcagccccgccgcgtcggctaaccaatccgggagcgcagaccccagggtcgcctgcacctgggtggtggttttgtgctgggcgaaatgggtcacggtcttcagcacccccagcccgggctgggcgccaaggccagactccacctcatcgataatggtttcgcccagcatctgatagccgccgcagatccccagcagcggcaccttgcgctgccgggcctgctcgaccgcgtgcgccatgccgctctcgcgcagccagcacagatcgccgagggtatttttactgcccgggagaatgaccaggtcggcgtcggccagcgcctgcggatcgcggacatagcgcacccggacgtctggctgcgccgccagggcgttaaagtcggtaaaattggcgatatgcggcaggtgaaccacggcgatgtcgatgtcgcgccggtcggtgcgatggtatttcccggcctgcagcgcgacgccgtcctcatcctcaagatccacgtcaagccatggcataacgcccagcaccggcaccccggtcaacgcctcgatttgctctatcccggagcgcaggagcgccacatcgccgcggaatttattgatgatcacccctttcacgcgcgcccgctcctgaggctgcagcagcgccagcgtgccgtaaatcgcggcaaacaccccgccgcggtcgatatcggccaccaggatcaccgggcattgcgccatctcggccatgcccatattgacgatatcgcggtcgcgcaggttaatctccgccggactgccggcgccttccagcaccagcgcctcatactctccggccaggctctggtagaccgcgaggatctgctcgcgcaggcgtggcttgtactggtgatagctcaccgcatccatgctggtcgccacctgccccatcagcaccacctgcgcctgacggtcgctggtgggcttgagcaaaatcggattcatgcggacatccggcgcaatcccggccgcttcggcctggaaaatctgcgcccggcccatctctttgccatccggcgtaatgccggagttcagcgccatattctgtgatttaaacggcgcggtacgcagcccatcctgatgaaaaatgcggcacagtcccgccaccagcacgcttttccccacgtcggaagccgtgccctgcaacatcactgccagcgtcatgacgcctcctttatcgcgcctatcgcgttgttgtgcatccgctgaaaaaactccgcctcggttttacacagcggcagccccagttcgctatgaagtttcaccagccacggctgcgtcaatcccgccctgtccatcgtctccgcgcaggcaaatacctcgccgggatcccccgcggccagtacttcgccgtgacgcagcacgtaaacggcgtcgctcacctcatagatcagatcgatatcgtggctggagatcaccacccgccgcccctgcccgacaatgcggcggatgatggcgatcatctgcgcccgcccgcgtggatcgaggcccgcggtgggctcgtcaagcagcaggtagcgcgcctgcagcaccagcgccccggcgattgccacccgttttttctgcccatggctgaggcactggatcggctgctggcgaaacccctgggcatcgacgagagtcaacgcctcatccacccggcgggcgatctcctcttccgccaccccgaggttacgcagactaaaagcgatatcgctgtcgatatcggtatagaagatttgctgatccggatcctgaaacaccgtcgccacctgctggcgcagcgccagcagaccgcgcttgctgtaattcagcgcctctccctgccacagcaccgccccctgctgcgggcgcagcaggccgctcaggttcataaacagcgtcgactttccgcagccgttggcccccaccaggccggtcaccgcatggcgggaaaaatccagcgtcagccctttaagtaccggctcatcctgatagcgaaaccagagatcggttgtggcaagcatacttatccttagaggtgaaaatcaccctggtacaatttgatatccagcgccgtgctcatctgctgatagcgcaggaggacgcgggtgaacagcagtcccaccagcatcgccagcgagcgatagccctgcggcacgctaccatagccaaaacgcagggtttgcgcgcggtgaatcgccatcgcctcgtccaacagaataaaaatgaagcgccaggtcagcaggatctgctccgtcaacagccgcggtacgcgaccgcgcttgagcaagataatcagctgtgggaaaggcagattaagcaccagccagagcgtggccgccatcgctgccaggctgcgccagaaggtctccccggccacggccagccccggagcggaaatccctatcgagaaagcgcccagccgcaagctcgctaacagcatctgcgggtcgcggctaacgctgaacacaatggtcagcacgccgaccagcaaaaagccaaagggtagcgccatccagcggcaccagcgccagaatgagacccgcagcagccagcaggtcagcgcggcggtcagcgccagcgtcagcgcctggccccacgccggcagcgtaaaggccagcgccatcagcagtagccagagcagaaacttacgctctggcgccacctgcaaccagcggctctggtagctgagtcggtcaaacccggtcatcacggcgctgtctgcccctcgcatatccgagaatgtaaaaaatcaccgccgcgccaagcgagccctgcagggtaaacagcagactctcaatctcgccgctcgccggttcatatagcggctggaaccagggttgataatccggcgccaccacctggatctggctctccgcttcgccgtccgagccgccaaactcgccgccgtggttaataaaaaatggcaggatcatcagggcggccaccatcgccaacaggatcagggtctttttcatattaatgtccctccgcggcgatcagtcgccgtttggttagctgatcgtagatcatcacggtgagcaagccttccgcgatggcgatcgggatctgcgtcaggcagaagatgcccataaacttggcgatcgatccgcctgccccggttgccggatcgggaaaagccaccccgagctggacggaggtgacaaagtaggtcatcagatccgccagcatggcgcagagaaagaccccgacatcgcgacggatccccgcccgacaggccagcttccacaccagatagccgaccatcgggccgatcaccgccatcgacatcccgttggcgccaagggtggtcaggccgccatgcgccagcagcagcgcctggaacagcagaacgatcgcccccagcaccgccaccacgcccggcccgaagaggatcaccgccagaccgacgccggtcggatgcgagcagctgccggtcaccgacgggatcttcagcgccgaaagaacaaaaataaacgccccgcagagggccagcagcaccttctgattgctctcttcctgaacgatacgccgcaggcgcaccaggccgtaccacaggcagggtaaaaacagcagccaccacgccagcgcccacatcggcggcaaaaagccctccatgatatgcatggcgaacgcctcctgcgggacgatgatcagcagaacagcggccgccagccccccatacgaaagctgcttcagcgatttcacctgattcattacgcctcctcccactgtttgttaaccaggatggtcgagaaatagggcagcggctggtcatcgctgacctcgcgcagacggcgccagcactgctcgcccggcagggtggcctctgacatcatcagcgccgcatccagcagccccgcctgcgccagcagcgccttaatgcgggcgaagcggccgtagactttcatcagtaccagactgtcatgctggcgcagcgccgcggcaatgtccgcttccggcgcggtgcaggagatcaccgccagcgactgctgctccatggccagcggggttttcgcccgcgcggcaatggcggcgaaggaggtaacgccagggacaatctccagccactccgggcagccaatccgctgcagcagaaagacccaggtgctgaacaacatggcgtcgccgagggtgataaacccgacctgcctgcccgccgccacctcctgggccagcgccgcggcaacgtcgttccacaccgcctctttttccgcgctgtcggcactcatcggaaaatggcagcagcggacctccgtgtgtgcgcccaggtactcgcgtacgatggagagcgccaggctgtcgccgcctttgcggccggctggcgcatacagcacatccagctggccgaggatccgcgccgcacgcacggtgatcagatcggccgcccccggcccgctgctcagggcgtatagtttgccgctcatgctgctttctccatcgtgtcgttcagcgcctgctgcagatgggcgacaaatatcgcccgcaccgccggattctcccctaacccgttaagccacggcgtggcggggataccggcggcattgaagcgggttttccacgaatcgtcttcgtcggaggccatatcattaatggcatgatcgccggccaccagcatcagcggcatcagatgcacgccggtcacgccctggcgggagagttcgttaatgacgatgtccacttcgggatagctttccaccgcccccacccgcgccggaaaaccctgcaccgccatcatatgatccagacaggcgtaggccgcgaaggcgtggtggctggcgccgtgccccataaacaccactcgctccgtcgccgccagcggcggcatctgctgacgcagggcctgcatcagctgcacataatcgccatgaccgctcaacagcggcgcgcccagcgtcaggcgctgaaagcgcgggcgcatgctctgcacttcgcgaacgatcttctcgtactcgtcgccgttgataatgtgcagggactggatagccacatcctggtatccctgctcggccagcttttgcagagcctgcagcggagtatcgatatgaataccgtcgcgctgctgcagtttgcgaataatcatccccgaggtgaaggcgcggaacagcgtgcggtccgggcagctggcggccagatcgcgctcgcaggcggcgatgttcttttcgcgggtgtcgtgatagctggtgccaaagctcaccaccagaagtgcttttttcatatcctcttcctcaagtcgccgacagccagcgcgtcagccgcgcagtgaaatcggcctggctttgcagtagttcatcgcccgtcaccagcggcgccggacgggtaatgacgatgcaggggatccccgcatcaagacagggttgtactttttcctgatagcctccttccgcccccgaggctttcgtcaccacaacatcggcccggcactggcgataaaaggcggcgttaaattcggcgctgaacggcccgcagagggcgaagatctccccgacgccaaaccccagatcgctacagtactgaaccacctccggcaccggcagcacccgggcgagcagcgttttctccgccagtcccgcccgccaggccgccagatctttgctgccggtggtcagcaggatccgctcgccgaggcgacgagccaccgcgcaggcctcgttcagatcgccgaccacgtgaagtaacggatggcgcagatcgctcagctgctccggcctttgatagcggctgagcagaaccccgacgctggcgcaggcgcgcacaatattctggctgaccacctcggcgtaggggtgagaggcatcgatcacccagcgggtgcgctgcgctctgagccactccgccatctgctgccactccatacgcccgcagcgtatctgcccgcggatatcgccggccagccgctcgccggtaggggttgccaccgacagggtgtagcgcacgtcggcggcgtccagctgctggcagatcgcccgcgcatcgctggtgcccccgataaccagcacgtcgccgtgattcacagcgcgtagcctcgcggggtgatcatcaggccgttgtcgatgtaagtcgctttgttgccaacgatcaccagactggtcatatccactggggcaaaatccatctccccgagggtggtcagccatttctcctgctttttgcgtccggcggatttgactacgccgaccggcgtatctgcgcttttactggccgccagcagcgcaaaggcgcgcgccagatgtccttcgcggccgcggctgcgagggttgtagaaacagataacgaagtccgcttccccggcggcgactatgcgtttttcaatcaccggccagggcgtcagcagatcgctaaggctgatatggcagaaatcatgcatcagcggcgcgccgagcagcgaggcggcggcgatactggccgtcatccctgggatcaggcggacctcaatgtccaactgctgcttattaaccagctccagcaccagccccgccatgccgtagatgccggcgtcgccgctgctgatcagcgcaacgttgtgcccggcctgcgccagctcgatggccgcctggcagcgctcaatctctttgcacatgccggttttgatcacctgcttgtcgccggtaaaggctttcaccaggtgggtgtaggtcttgtagcccaccacgatctctgccgcctgcagggcctccacggcttccatggtcatcatcgcctgcgagccagggccaattccgattacgcttaacatcagtgtgttactcccaaagtaatggtcacgccctgctcacgcagggtttcgccggacaggtttccctgactcagcagccaggccaccgggccggagacgctgccgacgccgaccgtttcccggacaaaagacgaggccggaaagcggtgctcgtgctcgcgcagcgcctcggcgctaaaggtttcgaacggcacccggcagcggtgagccagctggcgcaaccccggctcgtttgccttcaggctcacgctgccgatcgctttcagcgccagcgggtcaagacgctgagcggcaagctggcgatccagcaacgtactgagcagcgcgcagggggtgtcgcgccgacagccgatccccgccaccacccgctggggcaccagcttccagtgaggcaccggcagcggcggcagcgaccggcgcagggtgacgcagatcagggcgtcgagcgccggcaagctcgccaggtcgcttaccgggataaacccgcgccggtcgcagcggcttagcgccccggtgaattcgccgtcgcaccacagccccacccgcttaccgctcaccagcatctggttaacggttttcaccgccgcgcgaaaatcggtcatccgggcgttcagctggaaggccagcgtgtcgagggcggccagctcgttgacgtcggtggcggtggtgatcaccgggtcggcgtcgagcatcccggcgagatagcgggttagcgcattggcccccccggcatggccggagagcaagctgatgacgtgccgggcgcgctcatcaatcaccaccaccgccgggtcgctgagcttgtcattcaccagcggggccagcacccgcacggcaatcccggtggcgccgataaaaatcagcgccgagaagctgctgaacgcctcgcgggcagcgctggcaaagccgccgttgaaggggataaacccctcttcctgcagcgcttcgctggtgtaacaggtaagcggcagcatggccgccagccgttttgccagccgcacgccgccgggcgtcaggcaaaacagggcaatggattcaggctttacggtattcatggctaaaatccgctgcgtacagttttgagtagtgatactcatcgccgaggaaggggccgaccaggatcagcgccgttttgcggatcccggcgtcgcgtactttgtcgccgatgtccgcgagggtaccgcggacggtctggctttccggccaggtggccttgtagatcaccgcgaccggggtggtcgcggggtagccgccctccaccagccgctccgccacccggtgaatacgttgcaccgacaggtaaatcgccatcgaggtttgatggctggcaaaggcttccagctgttcgcgcgcgggaaccggcgtgcgcccttccagacgggtaataatcagactctgcgagacttcgggtaccgtgtactccacccccagctccgccgccgcgccgaggaaagcgctgacgcccggcaccacctgccagcggatcccgcggcgggtcagctcttcgccctgctcgcgcaccgagccatatagcgagacgtcgcccgtctgcagacgcaccaccgtttttcccgccttcacccccgcctccatcaggtcgaggatctgctccagatgcagcgcggcgctgtcgtggcactccgcctgtggcggacagtaggccagtagctcggtgttgatcagcgacccggcgtagatcactacccgcgcctgctgtagcagacggtagcctttgagagtaatcagttcgcgatcgcccggaccggcgccgacgaaccacacgcaatggggatcaaaagtctcagccatggttttcttccttctgacaggcgatgacaaaaacgggattatggggtttgaagtagtggccgctgcccagggtagccagggtggagaccgccagctgctggcagtccacctcgtggatgccgctctgccgcaggtgcgccagagcgctatgaaggttttcctgcaaaataaaagtcatcaccagccggccgccgggatgcagctgcgccagcgaccagtcgatcagcgccgtcaggtggccgccgctgccccccataaagatcgcgtcggctttgtcggcgaccgccagcggcgcaacgcccgccacgatagcgatgttgtcgcagccaaagcgctgccggttctccgccagcaggcgcagcgcgtcggcctgacgctcaatcgccgtcacccgcagcgccgggttctgtagagcagcctcaatgctgacgctgccggtgcccgcgccgatatcaatcagatggcgcgcccggtgcagctccagcttcgccagcgccagcgcgcgcacggcctctttggtcatcggcacctgggcgccgcgcaaaaacagctcatctttcatcgaggatcaccaccgcattcatctcatattcgtcctccacggcgctgaccggcagccagtggatccgctcgttttccatcgccaggttctcgcctatcaccatccagcgatggcctttgccgcgggccatcagctgggcggctatctcccgcggtccgcagcggccgtcggtcaccatggcgactttccggtgggcggccagcgcatcaaagctcaccgcccggccatggctgctggtcagccacatatcgttcatgtcgatgcccgcccgggcgcagaggtactgcaccgcgctgatgccggggatcacctgcactcgttcccggccaaaatgggcaatcagccgggtgccaatgccatagaacagcgggtcgccagaggccagcaccacgacgcggcgcccggtacgggcctcgatccacgccagcagcgccggcatatcggccctcagcgcgaagcgctcgccggcgaagtcgggaaactgctggagatgacggctgccgcccaccagcgcctcggcggcggcgattgcctcgcgcgcggccggggtcagccactgcagccccgccgggcccattcccacgaccgtcaacatgtcagctcccgggcaattgccgccagcggacggctgctgcccagtacctggttatcaaaagaaaacagaaccgcgtcgcaggtgggcggttgctgagtgaagcgcagcatctcaagaacacgctggcagattcgctcagccagatggttatagaggcgctggtatccccaggcgtcgatatgctccattgccgcttcggtagtgtcgcactcgctgaccagcgtcagcagcggcagcggcgcgccaagcagcgccagatgagcgacgagagtttccatccgcgcatcggcgatatggctgtgggtatgaaagatcccggcggcgattttgatcagtttgccgggatggccaatgagcacaatctggcggaaaccgagccgaaccgcctcttcaatcatgtagccgacgaagttgctcatggtgaccaccatctgcgggtcgatgcccatctgctcgcggacaaagcgctcaccgtggttgcccggcaccagcaccacgcgctccagcccggcggcgcgttttatctccagctcgagggagagcgagcgcttccagctctcttccgacatcggggtaacgatccccgtggtgccgataatcgagatcccgccgaggatccccagccgggcgttataggttttttgcgcgcgaagtacgccttccggagcaaaaatctccacctgcgcgccgcgggtaggacctatcgcttcgcgcacggcggtctcgatggtgtgccgcggagtgcggtttatcgccgggctgcctgtcggcaggccgatccctttgcgggtcaccgtgccgataccctccccgccctgcaggctaatctctccgctgtcattgagggtgacccgggcaaaaatcagcatgccgtgggtggcgtcgacatcatcgccgccgtctttacggatcgcggcgaccgcctgctgcccttcgacgtgcggggactcaacgttcaggcacagggtgacgccggagggggtgacgatcgagacctgatgaatcagatgctggcgcatcaccatcagcgcagccacttttgccgccgctgtggcgcaggagccggtggtgtagcccttgcgcagcgctttgccgtgatgccacaccggggcgtcaaaggtctgatcgctcattgcgcctcccgcaggtggtaaagcagagcgttcacaatcgctgccgccacgttgcttccccctttgcggccgagcgcggcgatggccggcaggccgctctcgctgagcgccgctttcgactccgcggcgccgacgaacccgaccggcacccccaccacgccgccgatggcggtctcgcgatgttccagcaggcgaaacagcgcggttggcgcattgccgaagacgaacactttctccccgggctcctgcaccgcaatatccaccgccgccatcgagcgggtcatcccccggctttgcgcctcgcgcaccacccgcgggtcgctgatatagcagcggcattcgccgccaaagcgggccagcagggttttgttgatcccggacagcgccatggtggtatcggtatacagcgtgcagggccggctcaaggcctcactcagcgcgatcagggcatccggagaaaaccacagaatatccagccagtcgaagtcagcggtggtgtggatcacccgcttgataatcgcctcgtgcagcgggctggcgaaacggtagtccggtcgcgtttcggcgatgatctcgctgatgatgtcgaagcttttcgcctcgatcgcctgcggttgttggatgtactgcatcaggttctcctcaggccgcgccgaccagccagtagcgcacgccgataaacagcgccagcgccaggcttgacgccacccacattaatcgaatggttcgggaaatatcgtccaccgcgatgtcgcggacggcgtcgcctatccagggcttttcaacgcgctggccgaagtaatcgttcgggccgccaaggcggatccccagcgcgccggcgacggtcgcttccggccaggcgcagttaggactgctgtgctgatagcgatcgcgccagcccgtacgcagcgcccgggcgccatcttcccggcatagcaccgcggcaaggctgagcagcagccagctcagccgggcgggaaggaagttggctacatcatcaagacgagcgctgaccatgccgatcgcccggtatttttcgtgtttatagccgaccatggaatcgagggtgttgaccgctttataggccatggccagcggcgcgccgccgaggagcaggaaaaagagcggcgcgataatgccatccaccgtgttctccgccacggtctccaccaccgcacggttgatctgcgctggctggagctgagaggtatcgcgcccgacaatccaggagagcttatgccggctttcggcgagatctccggcctgcagcggccgggccaccgccatcgccgactgtgccagacagcgtcccgccagcgcggtgaagatcatccacacttccaccagccatccaagccaggggtggatcccgtgcgccagcgccagtacgccccaggccacgccccatgtcaggccgataaccaccagccacatcaccccgccgccgatgcgcagcgcccggtcgctatggcagatgcgtcgcactacacgctggctgacggcgatcaggcgacctatccagcgcaccggatgcggccagtgcggcggatcgccaatgacgacatcaagtatccaggctacacaccaggcgagaagggtcatagcgccctccttgctgcccgcaaccagtggttgagcatggtgggacgctgggcaaaatggacatggagatagctggcaaaggcgctgccggactgccatcctccctgccactgctggagcgtcttaccgtctcgctgtttacggcaggccagtacggcgggggtggagggagaaaaatcggagtaatgaaattcatggccgcgcagccactcgccaggggctgccagcagcgtctgctgctgcgcctgcgcttcgcagtagccgaaccgggtcagacgcctccccattcggctgtgtccgggaataatatccgccatcgtgtagcgctcgccgctggtgacttccagggtcgagcccagatacatcaggccgccgcactcggcgtagatcgccaccccgcgccggtgcgccgcgcgaagctgtgtcagcatctcgtggttggcggatagcccggccgcatgcagctccggatagccgccgccgagccagatcatctggcaggccggcagctggcgatcgcgcagtgggctaaagcgtaccatcttcacgccgcagcgcgccagcagcgccaggttatcggggtaataaaaattgaaggcctcatcgtcggcgagggccagcgtcagtccttcgccggcatcggcggcaagctgttctccccactcgccgatcggcatggcggccagttcgctgagggccagcagccggtctatatcgagggtgcgccccagcaggctggcaaaatcccgccatgcctgctgattgaccaccgactcgcgggcggtcaccagccccagatgtcgttcgggcagcgccacgccttccacgcgcggcacatagccgagcactggcacccgacagtagcgctcaatggcgcttttcagcagctggaagtgcgcgtcgctgttgacccgattgacgataacgccagcgatgtcgagagccggatcaaaatgttgaaaacccatcaccgtggcggcgatggaggtcgacaccgctttgccatccaccagcaaaatcaccgggcagccaagctgcttagccattgccgcgctgctgcagtagttagggtcgatgccgtagccgtcatacaggcccatcaccccttcgataaccgcgatgtcggcctgctgtagctgttcggtaaacagcgcgttgagtatcggggcgggaagcataaagctgtcgagattgcgggaagcgatgccgctgatggcggtgtgccaggcggtatccaggtagtcaggccctactttacagggttgcacccgcataccgcgttgttggagcaagctgagcaggccgagcgtaacggtggttttgccacaaccgctgccggtacccgcaagaatgaacgcacgcctggttgccataccctgtcctgttctggcggtcagggtatagctacgcgcatgcctggtcctgcgaccacgcaccgctaagccacccacttcccaccgaagttgttggtcagttaccggcaggcaggtcttctggcttagcctcgttctcgcccgcccttcccaatctttcgatcagtggtttttgcggggtcgtcagcatcacagcagcgggggctgcgggggatttacacccccttccctgacaccaaactggtgtcgaacctgtcggtttgtttcgccgatgcgccctgcatcgacgggtattactttatgttttcttttaccgtttcatcactcgtcacaatgacgtcagtgaaggaaagcggtgttgtgataatcagctgtctcgtattaacggacactctatctcatcacaaaaataaaaactggtgtagtttacccctcgaatatcactattttgttgcgctatgacaatttattgctctactgtcgtttttttcattttatattgatgaagatactcggggatatcaaaaatcggcaatagcaaaatattgtcatttaaaaagactcagtttgtgatccggcattaatttgctgacgaaatgcctgcggcgttacctgataggtctggcgaaacactttgcaaaaatagctggtttgcgaaaaacctaaattccgcgcgatgctggcgatgctccagtcgctgtggcatagcagctcttttgcgctcgccatccgctgctgattgacccaggcgttaaaaccgatcccctgatactttttaaacagtttgctgaagtagtacgggctgagatagacatgcgccgccacatcctccagacgcagctcatcggagagatgcgcgtcgatatagcgcagcgccttcttcattttgccatcgtgcggcgagggcgcccggctggcctgcgccgggtcgttctgcgacgggttatctttgataaccacaaagttgagctgttttttcaggcaattctcgacgatcagcttcagcagatccgccgaagcgataacccgcgaatagtccatctccggcacatcgcgaaacgcctggaccagcgccggatcgtcctgccagcggtcatcgacgttcaagatatcaaccagttcaacatcattgctcagacgcacctgcccgcacagcacgaaaccgaccaggtggccggcaatcaccagcgggatggaaaaatcggttaaccccgcatgacagcggtagatacacagctggtcttttttcgaggcttccagcccgccgcagcggtcgctcatgcgacagcgtccgctgtgctccgggtgctgacgcatcagctggcaaaacggcgtgaaattaaacaattcagaaatctcatcaccgtgaatattgacgaccacaaccgccagactggtggcttgcgcaaaatcctgtgcgattttattgatgagttctgagtttagggtactcgcagaaatcatgataaaacccctcagttaattttttgttataaataaaacatatttttcatatttaccttttttagcatcagatcccatcgacgataaaaaagtgcattgacaataacaaaagtctcccaacccggggagactttttgagcggttcgtgatatcggttcatgaaattagcctggctatttcacagatacattccccttatgacgctaacgcgtattttcttcctccacgcaggtatgacagggcagattattggcgataagaaaacgataaattgcggcgccgaggcaggcccctaacaacggtgcgataatgggcacgataaaatagggaatatctcttcccccggtcatggcgatattgccccacccggcgaaccaggtgaacaatttcgggccaaaatcgcgtgccggattcatcgcgaagccggtaagcggcccggtcgaggcgccgatcaccgccaccagaatgccaatcaacagcggcgccagtgggcccttgggtacgccgttgccatcatcggtgagcgccatgatcatccccatcagcatcgaggtgatcaccacctccaccagcgccgcatgccagatgctgagctcaggcgccgggtaggtgctgaatatactggccagctgcaggctttccaggctgccgcgcaccatatgatgcaccgtttcaaattgcgtaaacagggtgctgtaaagtatccaggccagcacggcgccgccaaacgcgccggcgacctgagccacgatatagggcaccacttttctgcccgggaagcaggcaaacagccacagggcgacggtgaccgcggggttcagatgtccccccgaaatgccggccgtcaggtacaccgccagagaaatacctagtccccagataatacagatctcccacagccccaggctggcgccggtcagtttcagggcgctcaggcagcagataccaaaaaacagaaacagcccggtgcctaaaaactcggcgatacattgcgcgcgtaaagaaccattcattgtgacacctcgtgacgaagttcgtgtccaggccagccaaccatccgctggctcgttgggtacggcgaggcccactatagaaaccggcagcggcaaagtgttggcatcctgcggaaatcgggcggcgtaaagtcgccgaagaagaataatttattgctatttgttcgcgaatccctgcagcaatggcgggcgttcaggggggtattttaatttccaactaaatgataaaaaattgcgaaagcgcagtgcttattttccaacaaatatcacatcacgcaaaatatcgcatagcaaaaacaatttaaaaaatcacctcttaaaatgtaaatacggagcgtgaattgcaatataatcacatttatacaaacaataaaatcaaataaaaacaacgatataaaataaaataaatccattttatattatataaaaaccactattttttcgctctccaccatcaactcagccattctttctcgccgctccgccatatagttccctcactggcacatatcctgcgaggtctttatgcaacaagaagcattaggaatggtagaaaccaaaggcttaaccgcagccatagaggccgctgacgcaatggttaagtcggccaacgttttattagttggctatgaaaggatcggttcaggcctggtgaccgtcatcgtgcgtggcgacgtgggggcagttaaagccgccaccgacgccggtgccgccgcagcccgccacgtgggcgaagtgaaagccgtacacgtcattccccgcccccataccgatgttgaaaaaatcttaccgaaggggaatagccaatgagcagcaatgagctggttgaacagatcatggcgcaagtcatagcccgtgtggcgacgccagagcagcaggcgcttcccgataccccccatcccacaggagagacggctatggcagagaaaagctgcagcttaacggaatttgtcgggaccgccattggcgacaccctcgggctggtcatcgccaacgtggatgccgcgttgctggaggcgatgaagctcgaaaaacgctatcgctctatcggcatcctcggcgcccgcaccggcgccgggccgcacatcatggccgccgatgaagcggtcaaagccaccaacaccgaagtggtcagcattgagcttcctcgcgacaccaaaggcggcgccggccatggctcgctgattgtgctgggcgggaatgatgtttccgacgtcaaacgcgggattgaggtcgcgctgaaagagctggaccgtaccttcggcgatgtctacggcaacgaagcgggtcatattgagctgcagtataccgcgcgcgccagttatgccctggaaaaagcgttcggcgccccactgggccgcgcctgcggcattatcgtcggcgccccggcgtccgttggcgtgctgatggccgataccgcgctgaaatcagccaacgtcgaggtggtggcttacagctcaccggcccacggcaccagtttcagcaacgaagccattctggtgatttccggcgactctggcgcggtgcgccaggcggtgatctccgcccgggaaatcggcaaaaccgtactggcgacgctgggcgccgaaccgaaaaacgatcgcccctcctacatttaatacccgcgaggctgattcatgagatcgaaaagatttgaagcactggcgaaacgccctgtgaatcaggatggtttcgttaaggagtggattgaagagggctttatcgcgatggaaagccctaacgatcccaaaccttctatccgcatcgtcaacggcgcggtgaccgaactcgacgataaaccggttgagcagttcgacctgattgaccactttatcgcgcgctacggcattaatctcgcccgggccgaagaagtgatggccatggattcggttaagctcgccaacatgctctgcgacccgaacgttaaacgcagcgacatcgtgccgctcactaccgcgatgaccccggcgaaaatcgtggaagtggtgtcgcatatgaacgtggtcgagatgatgatggcgatgcaaaaaatgcgcgcccgccgcacgccgtcccagcaggcgcatgtcactaatatcaaagataatccggtacagattgccgccgacgccgctgaaggcgcatggcgcggctttgacgagcaggagaccaccgtcgccgtggcgcgctacgcgccgttcaacgccatcgccctgctggtcggttcacaggttggccgccccggcgtcctcacccagtgttcgctggaagaagccaccgagctgaaactgggcatgctgggccacacctgctatgccgaaaccatttcggtatacggtacggaaccggtgtttaccgatggcgatgacaccccgtggtcgaaaggcttcctcgcctcctcctacgcctcgcgcggcctgaaaatgcgctttacctccggttccggctcggaggtgcagatgggctatgccgaaggcaaatcgatgctttatctcgaagcgcgctgcatctacatcaccaaagccgccggggtgcaaggcctgcagaatggctccgtcagctgtatcggcgtgccgtccgccgtgccgtccgggatccgcgccgtactggcggaaaacctgatctgctcagcgctggatctggagtgcgcctccagcaacgatcaaacctttacccactcggatatgcggcgtaccgcgcgtctgctgatgcagttcctgccaggtaccgactttatctcctccggttactcggcggtgccgaactacgacaacatgttcgccggttccaacgaagatgccgaagacttcgatgactacaacgtgatccagcgcgacctgaaggtcgatggcggcctgcggccggtgcgtgaagaggacgtgatcgccattcgcaacaaagccgcccgcgcgctgcaggcggtatttgccggcatgggtttgccgcctattacggatgaagaagtagaagccgccacctacgcccacggttcaaaagatatgcctgagcgcaatatcgtcgaggacatcaagtttgctcaggagatcatcaacaagaaccgcaacggcctggaggtggtgaaagccctggcgaaaggcggcttccccgatgtcgcccaggacatgctcaatattcagaaagccaagctcaccggcgactacctgcatacctccgccatcattgttggcgagggccaggtgctctcggccgtgaatgacgtgaacgattatgccggtccggcaacaggctaccgcctgcaaggcgagcgctgggaagagattaaaaatatcccgggcgcgctcgatcccaatgaacttggctaaggggtgaaaaatggaaattaacgaaacgctgctgcgccagattatcgaagaggtgctgtcggagatgaaatcaggcgcagataagccggtctcctttagcgcgcctgcggcttctgtcgcctctgccgcgccggtcgccgttgcgcctgtgtccggcgacagcttcctgacggaaatcggcgaagccaaacccggcacgcagcaggatgaagtcattattgccgtcgggccagcgtttggtctggcgcaaaccgccaatatcgtcggcattccgcataaaaatattctgcgcgaagtgatcgccggcattgaggaagaaggcatcaaagcccgggtgatccgctgctttaagtcttctgacgtcgccttcgtggcagtggaaggcaaccgcctgagcggctccggcatctcgatcggtattcagtcgaaaggcaccaccgtcatccaccagcgcggcctgccgccgctttccaatctggaactcttcccgcaggcgccgctgctgacgctggaaacctaccgtcagattggcaaaaacgccgcgcgctacgccaaacgcgagtcgccgcagccggtgccgacgcttaacgatcagatggctcgtcccaaataccaggcgaagtcggccattttgcacattaaagagaccaaatacgtggtgacgggcaaaaacccgcaggaactgcgcgtggcgctttaacaaaggatatcccgatgaataccgacgcaattgaatccatggtacgcgacgtgctgagccggatgaacagcctacaggacgggataacgcccgcgccagccgcgccgacaaacgacaccgttcgccagccaaaagttagcgactacccgttagcgacccgccatccggagtgggtcaaaaccgctaccaataaaacgctcgatgacctgacgctggagaacgtattaagcgatcgcgttacggcgcaggacatgcgcatcactccggaaacgctgcgtatgcaggcggcgatcgcccaggatgccggacgcgatcggctggcgatgaactttgagcgggccgcagagctcaccgcggttcccgacgaccgaatccttgagatctacaacgccctgcgcccataccgttccacccaggcggagctactggcgatcgctgatgacctcgagcatcgctaccaggcacgactctgtgccgcctttgttcgggaagcggccgggctgtacatcgagcgtaagaagctgaaaggcgacgattaacagggggtaagcatgcgctatatcgctggcattgatattggcaactcctcgacagaagtcgccctggcgacggtcgatgacgcaggtgtgctgaacattcgccacagcgcgttggctgaaaccacgggtataaaaggcacattacgaaatgtgttcggtatccaggaggcgctaacgcaggcggcaaaagcggccggcattcagctcagcgatatttcgcttattcgcattaacgaagccacgccggtcattggcgatgtggcgatggaaaccatcacggaaaccatcatcaccgagtccaccatgatcggccataacccgaagacacccggcggcgtcggactgggggtcggcatcaccatcacaccagaggcgctgctgtcctgctccgcggacactccctatattctggtggtctcctcggcctttgactttgccgatgtcgccgcgatggtcaatgcggcaacggcagcgggctatcagataaccggcattattttgcagcaggatgacggcgtgctggtcaataaccggctacagcaaccgctgccggtgatcgacgaagttcagcatatcgaccggattccacttggcatgctggcggccgtcgaggtcgctttacccggtaagatcatcgaaacgctctccaacccctacggtattgcgaccgttttcgatctcaacgccgaggagaccaaaaatatcgtgccaatggcgcgggcgctgattggcaaccgctcggccgtggtggtgaaaaccccctccggcgacgtcaaggcccgcgctattccggcaggtaatctgctgctcatcgctcaggggcgcagcgtacaggttgatgtggccgccggggcggaagccatcatgaaagcggttgacggctgcggcaaactggacaacgtcgcgggagaagcgggcaccaatatcggcggcatgcttgagcacgtgcgccagaccatggcggagcttaccaataagccagctcaggagatccgcattcaggatctgctggccgttgatacggcggtgccagtcagcgtgaccggcggtcttgcgggggagttctcgctggagcaggcggtgggtatcgcctcgatggtcaagtcggatcgcctgcagatggccctcatcgcccgtgaaattgagcacaaactgcagattgcggttcaggtgggcggcgccgaagcggaggcggccattcttggggcgctcaccactcccggcaccacgcgcccgctggcgatcctcgatctgggcgccgggtcgaccgacgcctccattatcaatgcgcagggagagatcagcgccactcacctggccggcgccggcgatatggtcacgatgatcatcgcccgcgagctggggcttgaggaccgctacctggcggaagagatcaaaaaatatccgctggcaaaagtcgaaagcctgtttcatctgcgtcatgaagacggcagcgtccagttttttccgtcggccttaccaccggcggtatttgcccgcgtctgcgtggtgaaaccggatgaactggttcccctgcccggcgatctgccgctggagaaagtgcgcgccattcgccgtagcgccaaatcacgcgtctttgtcactaacgccctgcgggcgttacgccaggtgagccctaccggcaacattcgcgacatcccgttcgtggtgctggtgggcggctcgtccctcgatttcgagatcccccagctggtcaccgacgcgctggcgcactaccggctggttgccgggcgcggcaacatccgcggctgtgaaggcccacgcaatgcggtcgccagcggattactcctttcctggcaaaaaggaggcacacatggagagtagcgtagtcgcccccgccatcgtcattgccgtcactgacgaatgcagcgaacagtggcgcgatgtcctgctgggcattgaagaggaaggcattccttttgttctgcagccgcagaccggcggcgatcttatccatcacgcctggcaggcggcgcagcgttcgccgctgcaggtaggcatcgcctgcgaccgggaacggctcatcgtgcactacaaaaatttacccgcatcaactccgctgttttcgctgatgtatcaccagaacaggctggcccggcgaaacactggcaacaatgcggctcgtctcgtcaaagggatcccatttcgggatcgccatgcttaatccacaggagaacgcagtatgaataacgcactaggactggttgaaacgaaaggcctggttggcgccattgaagccgctgatgcaatggtgaaatccgccaacgtgcagttgattggttacgaaaaaattggctccgggctgattaccgtgatggtccgcggagacgtcggcgcggtcaaagccgccgttgacgccggcagcgcggcggccagcgtggtcggcgaggtcaagtccagccatgtgatcccgcgcccgcatagcgatgttgaggccattctgccgaaatccgtctgaccctcaaaaaaggagcaccgcgtgaagcaatcactgggattacttgaggtcagcggtctggccctggccatcacctgcgccgacgctatggcgaaagcggccgccatcacgctgctcgccctggaaaagaccaacggttccggctggatggtggtgaagatcgccggtgatgtggcctctgtccaggcggcggtgatgaccggggccgaactcgccgaacggcagcaggggctggtagcgcagaaggttatcgccaggcccggggaaggcctgctgccggcccgcgtccaggcgccttcaccagcgcctgacgtcgccgtgacggaggagaacacggccctcacagacgccccctcccactctacggagcgggtgacctgcaacctgtgcctggacccacactgcccacgacaaaaaggcgatccccgctcgcagtgcctgcacgccggtaaacgaggtgacgcgtaatggataaacaacagctggcttcgacagtcaacaaagtgctggatgagatgcgccagcgtcccattccaatcggtatctccagtcgccatatccatttagcggcggctgactatgccaggctttttcccgcgcagcccatccagccgaaaaaagcgctgctgcagccgggacaatatgctgcagagcagacggtgaccctggttggccccaaagggcgattaaacaacgtgcgcctgctcggccctttgcgccagaccagccaggtggaaatctcacgcaccgacgcccggatcctcggtatcgccgcgccgctgcgcatgtccggcaatctgcagggcacgccggggatccgcctgataagcccctttgccgaactggagctgagcggcgggacgattgttgcccagcgacatattcatatgtcgccacttgatgcgttgatcctgcgcgtctcccatggcgatagcgtcgcggtggcgatcgaaggcagcgacaggcggcttatcttcgacaacgtagcggtccgcgttgccccggatatgcgtcttgaaatgcacatcgatactgacgaggccaatgcggcaggcgctgacgctgcgcaagcctgggcaacgctggtgacgaagccatgaaccacgcgatgctgcagcgtatcgtcgaagaggtcgccgcccgtctgcgccatcgcgccctcagcacggccacgctcagcgtggcccagctcggcgaagcggatatccgcagcctgctgtgccagcacgcttcgctgcgcatcgtgcaggtggatttaccgctgctggagcagcttgccggccagcgtgcgctggcggcagccggttgcgcactgcatgaggcgatggcctggggcgttcgggtacagctaacgctgcttcccgccctgctccccgcgctggcggtaaaaaaactcgcccgcttgccgctgacgttcagcgatccgcttggccagcccgtcaggcttcacgccgcgtcggtgctcacctatgccgacgtagcccgtttcagtggcggctatctggtgctgcgccgccgtcccattatcaccgccctcgcccgcgaagcggccgtcgcgcggcatgttcaattgattaagcaggagtgaactatgcatctggcacgcgtgaccggcgccgtcgtctcgacgcaaaaatcgccctctctgaacggcaaaaaactgctgctggtgcgccgggtaagcgcggacgacgatcgtccgattctccccacgagcggcgatgaagtggcggtagattcggttggcgctggcgtcggcgagctggtgctgctctgcagcggctcgagcgcacgccacgttttcagcggcccgaatgaggccatcgatcttgccgtcgtgggcattgttgactcactttcacgctaagggggcgcctgtggctatctatacccgaaccggcgatgccggcagtacatcactctttaccggccagcgggtcagcaagacgcatccgcgcgtcgaagcctacggcaccctggatgaactgaacgccatgctgagcctgtgcgtctgcgccgtcgctgaagaggaacagcgcaccctgctcgaagccctgcagcagcacattttttggttcagcgcggagctcgccagcgacagcgaacagccatcaccgggtaagcgctatatcagcagcgaagagattgccctgctggagcagaccatcgatcgcgagatggcccgcgtgccggcgctgcaccagtttgtattgcccggacgctgtgaagccgccagccgtctgcacctggcccgcaccgttgccagacgggcggagcgccggctggtcgagctggcggcagaggttactatccgtcagatactgctgcgttatctgaaccgcttatctgactgcctgtatgccctggcgcgcagcgaggatcatgccgctcaccagcgccgccttgtgacggagatcgcggcccgctatctggccgccagcgggtcgcctgcgcccgacgcgcccaaagcccaggccgggtcgctctcctttcacgagctgcatcagctcatccgtcaggccattgaacacgcccgccagctgcaggtgccggtggtgatcagcatcgttgacgcacacggcaccgaaaccgtgacctggcgaatgcccgatgcgctgctggtcagcagcgagctggcgccgaaaaaagcctggaccgccgtcgccatgaaaaccgccacccacgagctcgcgacgaccgtacagccaggcgctgcgctgtacggtctggagagccatctgcagggcaaagtcgtcacctttggcggcggatatccgctgtggcgcgatggccagctaatagccggcctcggcattagcggcggcagcgtcgagcaggatatggctattgcacaggctgccatggcggccattaacgtgagaactcatcaatgaatacagcagaactggaaacccttatccgcaccatcctcagtgaaaagctcgcgccgacgccccctgcccctcagcaagagcagggcattttctgcgatgtcggcagcgccatcgacgccgctcatcaggcttttctccgctatcagcagtgtccgctaaaaacccgcagcgccattatcagcgccctgcgggagacgctggcccccgagctggcgacgttggcggaagagagcgccacggaaaccggcatgggcaacaaagaagataaatatctgaaaaataaagccgctcttgaaaatacgccgggcatagaggatctcactaccagcgccctcaccggcgatggcgggatggtgctgtttgagtactcgccgttcggggttattggcgccgtggcgcccagcaccaacccaacggaaaccattatcaacaacagtatcagcatgctggcggcgggtaacagcgtctatttcagcccccatcccggcgcgaaaaaggtctcgttgaagcttatcgccaggatcgaagagatcgcctaccgctgcagcgggatccgtaacctggtggtgaccgttgccgagccgacctttgaagccacccagcaaatgatgtcccacccgctgattgccgttctggctatcaccggtggccctggcattgtggcgatgggcatgaaaagcggtaaaaaagtgatcggcgctggcgccggcaatccgccgtgcatcgttgatgaaaccgccgatctcgtcaaagccgccgaagatatcatcagcggcgccgccttcgattacaacctgccctgtatcgccgaaaaaagcctgatcgtcgtcgcctccgtcgctgaccgcctgatccagcagatgcaggattttgacgcgctgctgttgagccgacaggaggccgataccctgcgtgccgtctgcctgcccgacggcgcggcgaataaaaaactggtcggtaaaagcccggctgcgctgctggcggcggcgggtctcgccgttccgcctcgcccccctcgcctgctgatagccgaggtggaggcgaacgacccctgggtgacctgcgagcagctgatgccggtgctgccgatcgtcagggtcgccgactttgacagcgccctggcgctggccctgcgcgttgaggagggtctgcaccacaccgccattatgcactcgcagaatgtctcgcggctcaatctggcggcacgcaccctgcagacctccatttttgtcaaaaatggcccgtcttacgcgggaatcggcgtcggcggcgaagggtttaccaccttcaccatcgccacgccaaccggagaaggcaccacctccgcgcggacgttcgcccgcctgcggcgctgcgtgttgaccaacggtttttccattcgctaaccgggggcgccatgcataccttttctctgcaaacgcgcctctacagcggcccgggcagcctggccgcgctgcagcgctttagccatcagcacatctggatcgtctgcgacggcttcctggcgcgctcgccgctgcttgaccgactgcgcgccgcgctgcccgccagcaaccgcgtcagcgtgttcagcgatattacaccggatccgaccattcacaccgtggcgaaagggatagcgcagatgcagaccctgcgtccgcaggtggtgatcggcttcggcggcggctcggcgatggatgccgccaaggctatcgtctggttcagccagcagggcggtctgcctgttgacacctgcgtggcgatccccaccaccagcggtaccggttcggaagtgaccagcgcctgcgtcatcagcgacccggaaaaagggatcaagtacccgctgttccatgaggcgctctgtcccgacatggcgatcatcgacccgacgctggtggttagcgtaccgcccaccatcacagcccataccgggctggacgcgctgacccacgccctggaggcatgggtctcgccgcaggccaccgattttaccgatgcgctggcggaaaaggccgccaggctggtgtttcgcgccctgcccgttgcgattcgtcagggcgactgcattgcgacccgcagcaaaatgcacaatgcatcaaccctcgccggtatggcctttagccaggctggccttgggctcaatcatgcgatcgcccatcagcttggcggccagtttcacctcccccatggcctggccaatgcgctgctgctgaccgcggtgatccgcttcaatgccggcgagccgcgagcggctaagcgctatgcgcgcctggccagggcctgccgcttctgcccgcccgcagctggcgaacaggaggctttccaggcgctgcttaccgcggtggaaacgctgaaacagcagtgcgccattccccccctcaagggcgcgctgcaggaaaagtatccccttttcttatcgcgaattcccgccatggtgccggccgcgctggccgacgccaccctgcgcaccaacccgcgtccggtcgatggcgcggccatcgcgcaactgctggagaacctgcaatgagtgaagcgatagtgccactatcaagcattgatgcagcggagatccgcgaacgcgttcgggccgctggcgtcgtaggagccggtggcgcaggctttccgacccacatcaaactgcaggcccgggtggacaccgtgctggtgaacgccgccgaatgcgaaccgatgctgaaggttgaccaacagctgatggctcagcaggctgaccgactgattcgcggcctgggttacgcgatgaccgccactggcgcccgggaagggatcattgccctgaaggcgaaatatgctccggcgattgcggcattaaccccacgactcccggaatgggcccggctgcatattctgcctgacgtctatccggccggggatgaggtgctcactatctggctggcgacgggacgccgcataccacctgccgcgctgccggtcagcgtcggcgtggtggtcaataacgtgcagaccgtgctcaatatcgccagagccgtggaacagggctatccggtgactcgccggacgttgaccgtcaatggcgccgtcgcccgtccgctgacgctggccgtaccactgggtatatcgctgcgcgaggtgctggatctggccggcggcgcgacggttgacgatccggggtttatcaacggcggtccgatgatgggctcgcttattacctccctcgagacaccggtcaccaaaaccaccggcggcctgctggtgctcccgggcaaccatccattgatccagcgacggcggcaggatgaacgaacgctgctcgccatcgcccgcaccgtctgtgaacagtgccgtttatgcacagatttatgcccccggcacctgatcggccatgagctttcccctcatctgctggtgcgggcggtgaactatcgccaggcggccaccccgtcgctgctgctcagcgccctgacctgttcggagtgcaacgtttgcgagagcgtcgcctgcccggtgggtatttcccccatgcgcatcaaccgtctgctgaaacgtgagctgagggcgaaaaacctgcgctacgacggaccgctgcgtccggcggacgagatggcgaagcaccgcctggtgccggtcaagcggctcatcagcaaactgggacttgatccctggtatcaggaagcgccgctgacggcggtggaaccggaggtggcctgcgtcaccctgcccctgcgccagcatatcggcatcagcgccgtgccctgcgtcgcgccgggagagcgggtaacgcgcggccaggtgctggcggatatccccgccgacgccctcggcgcgccggtgcacgccagtattgacggcctggtctccgccatcacggagcaggccattacgcttgtaagaggttaatcatgacccaggctatcggaattttagaactgaccagcatcgccagggggatggagctgggtgacgtcatgctgaaaagcgcgaacgtacagctcctgctctgcagaaccctttgccccgggaaattcctgctgatgctcggcggcgacgtcggcgccgtgcagcaggcaatcgccgccggcaccgcgcgcgccggggagatgctggtggacagcctggtgctggccaacattcaccccagcgtactaccggcgatcagcggtctcaacgtggtcgggcagcggcaggcggcggggatcgtcgaaacctggagcgtggcggcgtgcatcagcgccgccgaccgcgcggtgaaagcggccaacgtcaccctggtgcgggtccatatggcgtttggtatcggcggcaaatgctacatggtggtggcgggtgatatcgccgatgtcgacaacgccgtcacggtggccagcgacagcgcaggcgagaaaggattactggttcaccgggcagtgatcccgcgaccgcacgatgcgctgtggcaacagctgatggagggataatggaaccgcaaacccctaccgaacgcatgatccaggagtatgtcccgggcaaacaggttactctggcgcatctcattgccaatcctggcaaagatctgttcaaaaagctgggtctgccggacgcagtctccgccatcggcattcttaccattacccccagtgaagcatcgattatcgcctgcgacatcgctaccaagtccggcgcggtggagatcggttttctcgatcgcttcaccggcgcggtggtgttgaccggcgatgtctccgccgtggagtacgcgctcaggcaggtcacccgcaccctcggtgagctgatgcgcttcaccgcttgcccaattacccggacctaagcccatgaaacgcctgatgctaatcggacccagccagtgcggcaaaacctcgctgacccaggtattgcgtggcgaaaccctgcgctatcagaaaacccaggccatcgtctggacgccggccgccatcgatacccccggggaatatctggaaaaccgctgcctgtacagtgcactgctcaccagcgtctgcgaggccgatgtcatcgcgctggtactaaatgccgatgcgccctggtcacctttttctccggggtttaccgccccgatgaaccgcccggtcatcggggtgatcactaaagccgatttggccgccccgccccgtctgcaacaggtccggacatggctcgagacggcgggcgccggacatatctttatcaccagcgcgttaaccggcgacgggcttgatgacctgttcgcctgcctgaatgcagaggaatatcaatgacctataaaatcatggcgattaacgccggcagctcctccctgaagtttcagctgcttaacatgccgcagggggcgttgctctgtcaggggttgatcgaacgtatcggcctgcccgaggcccgcttcacgctgaaaacgtcggcacagaaatggcaggagacgctgcccatcgccgatcaccatgaggcagtgaccctcctgctggaggcgctgaccggccgcgggatcctgagcagcctgcaggagatcgacggcgttggccaccgcgtcgcccacggcggcgaacgcttcaaagacgccgcgctggtctgcgacgataccctgcgggagatcgagcgcctggcggagctggcgccgttgcataacccggtcaatgcgctgggcatacgtctctttcgccagctgttacccgcggtaccggcggtggcggtttttgataccgcctttcaccagaccctggcgccggaggcctggctctatcccctcccctggcgctattacgccgagctgggcattcgccgctacggttttcacggtaccagccatcactatgtcagcagcgcgctggcggaaaagctgggcgtaccgctgagcgccctgcgggtagtaagctgccatctgggcaatggctgtagcgtctgcgccatcaaaggcgggcaatcggtgaatacctcaatgggctttaccccgcagtccggggtgatgatgggcacccgcagcggcgatctcgacccgtcgattcttccctggctggtggagaaagaagggaaatccgcccagcagctcagccagttgctgaataatgaatccgggctgcttggcgtctccggcgtgtcctctgattaccgcgacgtcgaacaggcagctgacgccggcaacgaacgggcggctctggcgctgtcgctgtttgccgaacgcattcgcgcgactatcggcagctatatcatgcagatgggaggtctggacgcgctgatctttaccggcggcataggcgagaattccgcccgtgcgcgggcggcgatctgccgcaatttgcattttctcggcctcgcgctggacgacgagaaaaaccagcggagcgcgacctttattcaggcggataatgcgctggtcaaagtggcggtgatcaataccaatgaagagctaatgattgcccgcgacgtcatgcgtcttgcattgccgcaggcgcgcgagctggcggtgtcggcataaacgacgcgcctcctcttgcggagaatcatggtaaccggcgggtcgccatgccactatgcgccctggcgaaggtaagcggaaaggtgaaaacgtggctgttgcacaatgtcccgcctcgtgcggagaacttatccagggctggatcctcggcagcgaaaagctggtctcctgtccggtggactggtacagcaccgtcgaggtcgagaccggggtaccgcgaaaagacgagcggccgctgtcgcgggcgatggtcgaccagctgctggcccactggggctaccccccagcgctgagccagcagatccgcatcaccctgcactcaacgatcccggtggccaaagggatggccagcagcaccgccgatatcgctgccaccgccgtcgccaccgcccatcatctgggccatctactggatgagccgacgctggcgcgcctgtgcgtcgcgctggagcctaccgacagcaccctgtttcgccagctgacgctgttcgaccataataccgccgccacgcaaatcgcctgtccccctccgccggcgctcgacctgttagtgctggagagcccgctgacgctgcgcaccaccgactatcaccagctgccgcgcgagccgggcctgttggcaaacgcctcccggctgcagctggcgtgggagaaagtacagcaggcctgccactgcggcaacccgcagctgctgggcgaagcagcgaccatcagcgccattgccagccagcagctgttgcctaagccggggtttgacgcgctgctggacctggtggaaagcgcagggctctatggtctcaacgtggcgcacagcggcagcgtcgtcggcctgctactggaccgccgtcggcatgacgtcgaatttctgcaatggcggctggcagacagcgacatcgccgcccactggccgcagcagcatctgctggcgatggtgcccgggggcgtcatcctgcagtaggcctcaggccagcacccggcgcaacgccgccagcagctggtcgttttcctcggcgctgcggatcgccacccggaaatagcggctatccagccccgggtagttggcgcagctgcggatcagcacatgctggcgcagcagggcatattgcaggtcaaaatcggctctgtcgcagcgcaagaacaggtagttagcacgcccgggccacacggtcagcccggccatctcctgcagctgcgcatagaaacgcgctccctcctcctgcagccactgccaggtggcccgctgatacgcccgatcctggagaataatttccccggccagggcggcataggcgttgatggaccacggcatttgtcgcgcgcgcagtcgggccaccgcctgggcatcagcgttcagcaggtagccgagacgcagccccggaatggcataaaatttggtcagcgatcgcagaacccagacgtgcggatgctgcgccagcagaggaataaaccccggctggtcggggataaagtcgaggaaggcctcatcgaggatcaggctgatgttcagcgcccggcagcgctgcgcaatggcttccagcaggccccgctccggcagcaggccggtggggttgttcggggtgcagagaaacaggcagtccagcgccggagtcagggcatcgaggatcgcgtcggtcagctgccagccatcgcgctcccgcagggcatactccaccacctcgcagtccaccgtctgcagcgcccgccggtactccgcgaaaccgggaatgacgatcatcgcccgccgcggcttaaggccgtggacgagggtgaagatcgattcagtttcgccgttgccggcgaggatctgcgccgccggcagctgatggtgggcagccagcgcctgatgcagctgttgatactcgacgtcaggatagcgttcggcgcagcctgggttgtcaacgatcgcctgcctgagcgaggcgggcatccccagcggattaatgttggcgctaaaatccagcagctcgccgggcgcaatgcccagcagggcggcggcctcgcgggtgttaccgccatgggcgcttttcagtaaggccatgtccctttcctgtgtggttatccgcggcgggccagcgtcgcgccgtcggcaaagtaggctttaatcccggcgaggatcgactcggccacctcctgctggaatttggccgttttcagtttccgctcttcttccacgttactgataaacgccgtctccaccagaatggaggggatgtcaggcgccttcagcaccgcaaagcccgcctgttctacccggttcttgtgcaggttattgatattgcccattttctccagcaccgccttgccaaatttgaggctgtcagcgatggtgagagactgcaccatatcgaacatggtgtggtcgacatagcggtcgccgctcttgctgaccccaccgatcagatccgaggcgttctgcgtctgggcgagatattttgccgcggtactggtggcccccttggtggagagggcaaacaccgaagagccgctgggctggcggctggtaaaggcatcggcgtgaatcgacacgaacaggtcggcgcgctgcttctgcgccttggcgacacgcactttcaacgggatgaacacgtcttcgttgcgggtcatataggccttcatattgccttctttgtcgatcagcgcccgcaggcgacgggcaatctgcagcaccacgtctttttcgcgggtgcgatactttcccacggcgccggagtcttcgccgccgtgtccgggatcgagcatgatgacaatcggccggtcgcgcccggctttgcccggctgcggcccgctttgcgccggcggcacctgccgctccagatcgcctttgttgtaatcctcgagcagcgccagcagcggatcctgaacatcggtagcgttggcggggtagagatccatcaccagacgctctttaaagccggccaccggcgcgagggcaaacagctgcggcttaacgttctgcttgagttcgaagaccatgcgcacggtttgcggatcaaactggcccacccgggcggacttaataaagggatcgtcagcgcggatctgcccccccatgcccttcagtaccgagttcaggttaaccccctccagatcgaccactacccgttccggattactgagggcaaactgccggtatttcagcacatgattcgattccaccgtgacgcgggtgtaggtcgatgctggccagacgcgaacagcgaccacccgcgcggcggcggccagcccgacagggctcacgctcattaaccacatggcgcccgccccctgcaataaacggcgacggcttaatccagagttgtttcccgacatgccactcccaagcaataaaaacgcatttatacccaaaacaaacagattgaccagaaactttaacgaaaggcatataacctgtcatctataaaagggtaaacattcattgacaccctgcgccgggtcacatgtttttcgcggcttagcctcaaattggggcttgcgtttaacggcaaaacagaataaaaatacaataattacgaataatcatgcattgagggtttgtcatggtgaaggaacgtcgcactgaactggtagaaggattccgccattctgttccctatattaatgcccatcggggaaaaacgtttgtcatcatgctgggcggcgaagccattgagcatgaaaatttctcaaatattgtcaatgacataggattattgcatagcctgggcattcgcctggtggtggtctatggcgcccgcccgcagattgacgctaacctcgccgagcaccatcacgagccggtctatcacaagcagacgcgagtgactgacgccaaaacgctggagctggttaagcaggcggcggggatgctgcagctggagatcaccgcccgtctgtcgatgagcctcaacaacaccccgctgcagggggcccatatcaacgttgtcagcggcaactttatcattgcccagccgctgggcgtcgatgacggcgtcgattattgccacagcggacgcattcgccgcattgacgaagaggcgattcatcgtcagctcgacagcggcgccattgtcctgatggggccggtcgcggtgtcggtcaccggcgagagctttaacctgacttcggaagagatcgctacccagctggccatcaagctgaaggcggagaaaatgatcggcttctgttcgtcgcaaggggtttacaaccaggccggggaaattgtctccgaactgttccctaatgaggcgcaagcccgcgtcgaagagctggaagcagacgaagactataactccggcaccgtgcgcttcctgcgcggggcggtgaaggcctgccgcagcggcgtacggcgctgccacctgatcagctatcaggaaaatggcgcgctgctgcaggagctgttttcacgcgacggcatcggcacccagatcgtcatggagagcgcggagcagatccgtcgggcgaccatcaatgatatcggcggtattcttgagctgataagcccgctcgagcagcagggcattctggtacgccgttcccgcgaacagctggagatggagatcgacaaattcaccattattcagcgcgataacaccaccatcgcctgcgccgccctctatcctttcccggaagagaagatcggcgaaatggcctgcgtggcggtgcatccggattaccggagctcgtcgcggggagaggtgctgctggagcgtattgccgctcaggccaggcagatgggactgagcaaactgttcgtgttaaccacccgcagcatccactggttccaggagcgcggcttcacgccggtggatatcgacctgctgccggagagtaaaaagcagatgtataactatcagcgccggtcgaaggtgctgatggccgacctcgcttaagcccttctcctctctatctaacggcccgggatagcgcgacgcttatcgctttatccccggccggtctcccgcccctcttcccgccagcctggcgtacgcacgcgggcgaaattcctggtttccgcgcaggccatttctttctcgctggctcaccgatatgctattggctgtcgacaggacgtcgactggcgccgcggccgccacccgcccagcaaggatcgcttaaagaatggaaaccaaaccgaactggctggtcagacatattaatctcattaccaccgcggtcgccctctatccgtggttgctgatgatactgctcctctgggataaccagcgccatcatcagcatggctatgccgcgctcggcgccgccatcgcgatattatttctgctggccctgacgtccggcatgaatcttctcatctcctcgctggtgattttttgtgcccgctgttccaccccaccgctggccggcggcgcagcagtccgctttttcgccatgaactcgatctcggcgctctggcttatccctctgttcttcagttactgatttttccgccagcccgggcaacggctgcagcattttccatcgcccggacccggcgtctcagggggcttcgcgcccggcgaaaatctccgccaggccgctgcgccgttcggtgcgcgtcacaatggcctgggagagcacctgctcgtcggcatagagcgacaaccgccgtttcgcgcgggtgatcgccgtgtagaccagttcgcgggtcaccagcgggacgctgcgcgccggcaggatcagcgccgcgtgttcgaactccgagccctgcgatttatgcacggtcatcgcccaggcggtatcatgctccggcagacggctcggctgcaccgacttgatggcgccgtcgggcatcaggaaccacacccgcagctcgccgttgcgctccagggcgatgccgatatcgccgttaaacagccccagcgcgctgtcgttgcgcgatatcatgatcggtcggccatcataccagcgagagtggcgcggcagggcgatcgcccgctggcggttgagccgctgctccagccgctcattgacgccgctcacgccgtacggcccctcgcgcagcgcgcacagcagctggaattcgctgaaagcggccagcatggcctgcggttcggcccgctcgcggcgcagctgcaggtagcgctcatagccctgctgagccgcgccgagcatggcttcgtactcttcggtcgtgctgaggggatgaagcgcgatatcgtcaaacggctggcgcagcgtggccttcacctccgcgcgcgcgccagcgttcaccgcccgcgccaggctcccgatgccggagtgactgccgaagcgatagctcttttgcagcaggcacaaactgtctctcagcgcgcccgcgatagccccctcgcccgccggcaccggcgaaccggtcagccgggtcagctcctgcgcccgcgcggcggtatagcccgaactcgcccaggcgcagatatcccccagcaccgcccccgcttctacggaggccagctggtcgcgatcgccgaggaaaatcacccgcccgtgggccggcagcgcgtcgataagccgcgacatcatcggcaggtcgatcatcgaggcttcatccaccaccagcacgtccagatgcagcgggttgccggcgtgatagcgcatccgctggctgcctggctgggcgcccagcagacgatgcagcgtgctggcctcggtgggaatcaacgctttctgcgcgtcggtcagcggcaattttctcagcgccgcgcccagcgattcggtcagacgcgccgccgctttcccggttggcgccgccaggcgaatacgacagcgcgggctgtcttcgatctggatcagcgccgccagaagcttcgccacggtggtggtcttcccggtcccgggaccgccggagatcactgagatgcggcgggtcagcgccaccgccgcggccactttttgccagtcggtttcgccggtggcagggaacagggcattcagggttgacgccagccgggcctcatccatctccagcacccggttggcttcattgaagaagcgggcgacggtcagctcgttgcgccacatccggttgagatagagccggtcgccgcacaaaatcatcggcgccggagcatcgccgcagctcaccgccgacgaagcgagcagcagtgcgggccagtcctccggcgcgccggcttcggccagcagccgatcgcggatctccccggctttaccgctcagcgcctcgtcgccgctcaaccgcgagagcggcagacagacgtgcccctcgccggcatcccggctcagcaaggccgccgccagcttgaccgccggcgggtcgttttgcgccaccatcagggcaaactggacgtccagcggccgcagcagacgctgctccaccgccgccagcagtagttgttcgaaagtcatgaggcctcctcctgagtttctccggcaaaaagctgatccagaccgtcaatcagcggtcgcaccggccgggtggtgaagatcccctgccccccctcctgcccgtccatgccgcgcaggaaaagataaatcacgccgccgaagtggcggtcatagtcataatcggccagccggtggcgcagatagcggtgcagcgccaggctatacagctgatactgtagatcgtagcggtgggcacgcatcgcctgctccatcgccggccgggtgtaggcctcgcgatcttcccccagccagttggatttgtaatccagcaggtaataacggccttcgtgacggaagaccagatcgataaagcccttcagcatgccgcgcacctggcggaaatccagcggcggcgtgtcggcagagaggggatcgtactggcggataagcgcgtcaaggcgctccgccgtcagcagctgggcgatgggcaggtaaaatgccatctccacctgtttatcccgcgccgcaagctgattgagcgcgatatccggccccggcaggcgggtcttcagcacgccccccagccagtcggtcagcaccggcgcccactgcgcgtcaaacccgctcagctgcagcttctccgccatccacccttccggcaccggctgggtgaagtccagctcctcaaacaggctgtgcaggaaggtccccggcgcggcgccgcgcgggaactggtgcggagtcagctgcggctcttccacgacttcgccgacgccggcggcatcaacatccagacgcggcagcaaatcctgcccgccgctgaaaccatgctgctgcagtccggagtaactggtcacccgccagtcgtcggcgatgcggcgctgcagctcgcgcgccgacaatcgcgggatggtcgccgcgggcgcctgccacggggtgagatccagttcgcccggaatctgtaatgcaatatcgccatgacagaagtccgccagccgcgcagccagcccagcggcgtccatggcttcgcccgcctgcagcagccgccccagcgcgctgaggtggaaatcgctgttgccggatttccggctgctgagcggcgccacgccgaggctgcagtgccagaccgcgcgggtcagggccacgtacagcaggcgcagatcttccgccagtcgttccgcctccgccagctcgaggctggcctcatcctggcccaaatccagcaccgccgcgaacgtctcgcgatcgtggtaaaacgcctggtcctgtttacgaaaccgggcgataaacggcagccagaccagggggtattccagcccttttgacttgtgaatggtgacaatttgcaccaggtgcttatcgctttcgagacgcatctgctggctggcggcgttgctgtccggctcggcgatatgctgcgccagccagcgcaccagggcatgctcgctttccagctggctggccgcctcctgcagcagttcgctgatgtgcagaatgtcggttaagcgccgctcgccgccgcgggtcgccagcagattctcggcgatatgtcgggctgtcatcaacgcccgcagcatcggcatcactccgcgctgccgccaaatctggcggtattcgctgaactcttccaccagcgcgtcccacgcctgctcatcctggttcaggttttcaatatccagcgcggtcaggccaaacatcgacgtcgccagcgcgctgcgcagggtattttcccgctccggggccagcaccgcctgcaatagccagagcagctcctgggcctccagcgtctcaaaaacgctgtcgcggttggagaggtagaccgagggaatacccagcgtctgcagcgcttcacgcacctgcgccgcctccagccggttgcgcaccagcacggtaatatccgaagcctgtaccgggcgcgaggtttccccgcgccacagcagcgcgcgcccctgctgaccggcgctcagccagtcgcggatctgcgtggcgcagagctgcgccataaaggtctgataatcgccagacccgacagtgtcgccgggcatcagccagacgttcatcgccggtacgtccgccgcgtcaacggtaaagcgcagccccttgttcttcgccgccgccttcaccggcaggaacgggatctcgtggaacatgaaggggttatcgctgaggctgaacagccgattgacgctgcccaccatgcccggcgaggagcgccagttggtatcgagggtgtagtgcgcggcaacgtcgccgcgcgctttcatataggtaaagatatcggcgccgcgaaaggcgtagatggcctgcttcggatcgccgatcagcagcagagccgtctccggctgccggcgccagatgcggcgaaaaatccggtactgctgagggtcggtgtcctgaaattcatcgatcatcgccaccggaaaacgctggcgaatagcgctggccagcgtctcgccgctgtcgccgcgcagcgcctcgtcaagccggctgagcatatcgtcaaaccccagctcgccgcggcggcgcttttcgcgggcgaccgcatcgcggatctcgaccatcgctctcgccagcaccagatcggtgagcgtcagcgaggaggccagcaacgactctacggcgctaaacaggggatgcaccggcggttcgccaccggctttggtgcgctcgagcagaaacgactgggcaaatttctccagcgcgtcgggcagctggtagcttaacgtctcttcctgcgcccaggcgttcactttctccatccacttgccctggttgccgcgattaaacttccgccggtcaaggccggaattttccagcacgccttcgatctcgcccacctgctcgcgccactgctgcttgagcgagtcaatgcgggcgatgatctgctgatggcgttcggccagcgtctcgttaggggctggcggcgacttaagctgcggcgcttcgccctgcagccagcggtcaagggacttcagcagatcgcgcggccctttccagacgtcgtggatcaccgccgcgatatcgcgggtcaggggatagcagtggcggcgccagaaatcggcgcaggcctgataacgcaggcgggattcatcctcgatcagctgttgctcgaacagcatgcccgactcgaaggcgttaaggctcagcatccgttggcaaaagccgtggatggtgaataccgccgcctcgtccatctgccgttcagccagcagcagcgtcttcgcggcgtcgtctttatcggcgatctccgccaacaacgcgctgtagagcggattgtcggattcgccgcgcaggcaggcgatgcgcagttcgtggatgttgctgcggatacgaccgcgcagctcttcggtcgccgcctcggtaaaggtcaccaccagcagttcttcaacgctgatggcgcggggataggcggcctcaccgcccagccccaacagcagccgcagatacagcgcggcgatggtaaaggtttttccggttcccgcagaggcttctatcaggcgctcgccgatcaggggcaagcgcaggggatccaaagactcagcggtgtcggtcattcattctctcgcatcaggggtaaggattgctgcaatgcgctgacgttttcccacactttgccgcctttcggctgggcatagtccgctttgccattctggctaccggaaatctgggacaagatcgtcatgccctgcggatccaccaccgtctgatggaagaagtcggcaagtttttgcggcgtcagcagtttaatctgagccactactttatcacgtgaatcaaaacgcatattaccgcgatcgaaatctttgctcagtttcgaggcttcatcgcccagcgtctgcggcgcctgcagcatctggcttatcaccgcctgctggagctgggcaaactcttccggcttcatcgcccgcagcttcgcctccgcggtggggaagaaggcctggaaccgctgccagaggaaggccggttgcttatcgctactctgcagcaggaagcccatgccccactggcgccccacgttcatcgggaaggcaaagaccgcgtagccgagttgctcttcggtacgcagctggttgtagaaccacggctgaataatctgtcccagcagggtgctggcggcggtgctgctgaactcatcaacattgggcggcgcgaacaccgcggccagcgcggagtcggtgctgttgcccgctttgttgaagatcgccagctgctgccggttcaccaccacgtctttattgcggcaccattcgttgccgtcagcgcccagctgctgctggatctggcgggccagggtcg
